United States Patent Application Publication US 2024/0226191 A1 - sequence listing, part 6

SEQ ID NO: 27 - DNA, 3318901 bp, Mediterraneibacter faecis (residues 1,659,452-3,318,901 of 3,318,901)
aagtgtattcaccgttgttccggtcacttcttttcctatctgcattccgctgtgaatcagttctttaaaagtcatatcttctttatggcttttcacttcataaacagatgtggtaactgtcagtgccatatcaagaacagctccaagagtactgagaagtataacagagacagcaacatttctcatactgatattcaggttcatattataataaaatacatcttctccaacctgttgtatctcgttaagacctcccgcctcacttctccatacaacgatatatatgaagaaaaacagcaacagcattgtgatcatagttgccagaaatgcactccatgtctttccatttctaccattttgatagaacaacgtaatacaggaaatgacaacgccgacacaaaccgtaacgagaagaacaggaactcctgatgccataagccagattgcaagacttaagatcaacagatttccacacaaagcaataagcgaaacgacacctctgtctccaccgacgaccataattaaaatcagtaaaatcaatccaagtgttatcagcattttccttctccctgcacctttcttgctttcttctgtctatgaaacattcctgggacctttatcatcacagaagtaaccaaaatagaaatcggtattgccagaacaattcctatactttccaccagaaatctgcacaattcacatggaatgtgcaattttataatagtaattaaactcacatcattattcattcgaatcagacacattgggatcagtccacagccaaagacaaacaacagcacatttatcatcgttcccataatgtcatatccaatttctcttcctgatttaaataattccaaaaatgtcacttccggcttcttttcaacgatttcgcttaaggatgcagcgatggcgaccgccacatccatgattgctcccagtcctgagatcaggatttctgcatggaaaatttcatccggattttcaatacttccaagatactccatggtcgaataatcaagatcttctgcatgatggattacaacatcaaagattcccatgatcattacaagaacaatcaatgttgtaaaaagtgctgcccatgtctttttatgaatcccgtttaatccaaccaatgtaataaccgcaaaaagaatcaccagcccgctgcacatttccagcacatttgatgtatctcccgctttccaaaaaccaattgcaaaaacagcaacattaaaaataacggtcaatatcgtaagcgcaccctgtcttcctgcaatggtaattaatacaaacattaagaatcctacaagtatcataagctctgtatctcgtttcagtccacgaattccagaacccattctcttgcttgttccattgagcagtaccttatctcccttatgatatggctgtttcgtcattccggtatacgtgtactcattcgtaaaacttattgtctttcccttgttttccccatttaggattactccctggatgttctgcttatattttttctccttcgtccctctggttcctgtctcttctcctgagacactggtttcgacctttgtcagttttgcaatgggtgtgctatacaaccatgcatcatttgcaacaaagataatacacagcagatacaatatgccaaggatacaatataactttcttttcttgctctgttttataaattccaacattactttacttccatctcgaatctatcaaaaatcatttttttattttaacgcaaaaaattttattgtcaagatgaatttgaaaatgattttcatgttaaaagaacaggacagcacgctaacgcgcactgctctgttcttctgttcttcttttctctattctactttgcttctccctccgggaaaataatcttattcacgaagaagaataccaccatcgacactcctccgttcagcacggttgttccgatattgtaaagccatcccggtacaaacattccggcaactgcaacccagatacaattgattgagtttacaatacatgtaacaatacagaatgcgatcagataccagaacgcctgataccagatctttcctttgctgcggaacacaaagcttctctggattgggaagttgatacactcaccaacgagcattgcgatcatgtatgcacagaaatacggaagacctccatgtgccgcatcatatccgataatattccacttaaatgtctcaccgaataatgtaatgtcgattcccgggaaaccgaaatcaatattcggaagtcctgcgaatgccagtggcaaaaacagcaacattacatatttaagtacagtgatcagattacttacgattacgaacaatccgccttctcttatccattttaaagcactcggatgtttctctgcaaaacgattccatatattgtttagcttatttattctacattctccattcttctaagattctcgattctcttgtcctcccttggacttcgtatctatatcctaacatggattacatgcctatctattatacttacataacctgcactttttctgcataaactgcaaacttaattcccttgttcttctttaatcggaatcaaaattttcaagtcaaaccagttctcttttgtatcgatcgtgactgccccaccgtatttattcactgtataacgaatactcttcattccgtatccatgatactttttgtctttctttgtcgtcgcaatatttccatcttggtactgcagtttttcttcacagtaattctcgaacttaagaatcaagaatgccttctgtctggacaccgtcacatggatcagtctcttctccttgtcctgtatcttcatctcgcattcgattgcattatcgagtgcatttccaaagatactgcagatgtccataacatccataaagtctaacagtgttccatctgccacacaggtaaatgtaatcccattcttattacaatacaaacttttgctcgtcagcacagtatcgagaactttatttccggttttattctgtgcttcatactgacggatctctgcttccatctgatccagaaaggcttctctcttctgaggatcttcctcacttctcaacaccgcaatctgatgtttcagatcatgatatttgtaattgatcagttcaatactttcctttgactgcacatactgtgcatattgattctgaagtacattctgaactgcctcaagctcctttcttgcccgcatctcacaacattgcataagatgtgcgtacagaatcgcaattccggccaaatccacgattgtacggatatttgctatctcaaatgaataccttccggaaaatggagtattgattgtaagatagctaatattactgacagcgaaaacagatattgcaatcaaaagtgctgacagacattctttccaacctatctctatttggccatcttctgggaaatgtacatgcaagatcttgaacaagatcacgctgattattccatatccgaggataagggctaaccattctttccaccatactcctgattgcgctatcctaaagtaacaagcaacctgccattcaatcgacgccatgaattctgccacaacaaatgcaatcaacacgaaatatactgcgtctgttatttcaatctcgcaggatgcataaatgaaaaacaacataaggaatacagctaccatcatgcagggaatccagaaaaacaagctgacatcttccgtcacgaccatgaatccgctctgtacaacaagcatcaccgccataatcacacctgtctttatttttgaaaatctctttttaaatggcaggataaatatcatgcatgcaagccactctgcaattgccgagtaaagtcttgggatatctggtatcaagtgatcgatcattttatcacctctccccaatatcttgtcaaagcttccataaattcctttttacgtgcacggctcaacaccagctcttcgccttttactaccgcacagttgtcctgaatccggtctacatgctgcagattaatcagatatcctttatttcctctgcagaaattcatccctgaaagcttttcatccatctctttcattttcccggtcgtctcataatccccaaggatcgtatgaaggatcaacgtatgtccctgactttcaatatagtaaatatttgcgatgttaatacgcaccataccgccttttatatttaccataataacctttgcctctcgctttttcatacgttcgatcgcacggttcagtctctgtgaaaatgcgaaataagataccggttttaatacataatccagcgcatctaccgcataacctctgatcgcatactgtgccatgtttgtaataaagataatcacaacttcactgtccatcttgcgaatctcttccgcagcagacattccatccatgaatttcatctcaacatccataaggataatatcaaattgggactcgtatttatttacaatctgatctccgtctgaatagattgtgatatcgaatgcttcatggttttctgcctcatattgatgcagaaattcttccagctgttttgcatacattgcttcgtcttctacaatcgcaattttgatcattgaaatcctcctggtatattttctgtcgtcttatgttctatcttataataaaggaatttttattctgccacaagtcatataatgagatttacctgttgctgactctgagcaatcactattttagcaaaaggaaaacaggattggcctgtttctatctgtccaatcctgtctttcatttaatatattacgcttctgcataatctacattttattctctgtttactgcagctttaatcagatgagctgttcctttgattcgatgtccgttcgccatctcagtcaatgcttctgccattttcatcgtcacaacaccgcctgtcatttttgcatacccgcggattggcatattgtagttgaataagacgttcaggttcggctttcccttccagtcactgattttcagaagtaatttcagaattgcacagagcaattttccaagaattccttttccgtaatacagctgacatactgcatcgttcattcgaatctcaccgctccagcttccatctggaatctcttttccatacagaatacggaatttttcgtctgaaatgtctttaatcttaccgctgaaatattccggcagttcttctttcttgtagccaccgttttcaacagtaccttttacgtctaaagcaccttccagaaccatctgctgcgcattttcaccgatcatgatctgataagtaccgctttcaatctcccagctatctgttcttgtatcataaaaacggaatgtcttatcatcaaatccgattcttacttccttctcttctcctggctgaagctctactcttacgaaacctttcaactcgcgaaccggtcgaaagacagtctcagaagatttcccaacatacagctgtgcgatctcagttcctgacacattacctgtattcttaattgtaaatgtcacaccttctgtatctattttcaaatctttatattcaaaggttgtatagctcaatccataaccaaatgggaaacgcattgtttttccgactgttgtgtaataacgatatccaacgtaaagtgattctctgtactcactgcttctttctttgcttgggtaatatgcgtatgccggtgtatcctcgtaatggagtgggtaagtctcattcagcttacctgacggatttacttttccggtcagaacattcatcattgctgacgcgcctgcctgtccgccaagataaccatgtacgattccttttacatatggataccatggcatctcgatcgctgatccggctgaaagaactacgatcacatttttatttactgttgtaagttcattaagtaatgtctcctgtgcggccggcatggacatatgtgtacggtcaagtccttcggattcgctgatttcatcaagtcctccgaagaaaagaacgatatctgctttcttcgcaagctctactgccgcctttgtcagcttctgattcggttttctgttgcgaatatatccctgctcatatacaacaacatccagatctgtggatccaatcacatcaaggattgcttccggctgttttgcagaatttacaagcgatgacccggctccctgatatcttgggactttcgcgaaatcaccgatcactgcaactttcgttcccggtttcaacggaagaatctgatcctcatttttcaggaggacaatactttcctcagctgcttttcttgccaggttatgatgcgcttccacatcaaatgtttttccctttgcgtcttctgttgcctgatgtgttgagaagattacatttaaaagctcatccagtctctgatccaataccgcttcttcaagatcaccattctcaaccgcatgaaggatatcatacattcctgattttcctgttcctggcatctcaagatggcttccgttcttcacgccaagtgcatggtcgttacttccgccccagtcagacacgacaaatccgtcaaatccccactcatctacaagaatttcctgtagcatgtggctgttttcatttgcatagactccatttacttcattataagaagacatgatggactttgacttgccttccttaatcgcaatctcgaatccggttgtataaatctcacggaatgttctttcatctacgacagaatcgttcgccatacggcgcagctcctgactgtttgctgcaaaatgctttggacaagctgcaatacccttgctctggattccacggacatatgctgctgccatctttcctgcatgatacggatcctctgaaaaatactcaaagtttcttccacacagcgggcttctcttgatattaagcccaggtccgaggatcacattgactcccattgtcactgcctcttccgcaagtgcttccccgatttcctctccaagtgcttcatcccagctgtttgccactcctgccgctgtcggaaaacaagttgccggaagactggcattcaatcccaaatgatctcccgctcctgcctgtcttctcaacccgtgaggtccgtcagacattaccatcgacggaattccatatttttcaaaatcaacggtctcccatgtgttctttcctgacatcataactgctttctctgccagtgtcatttttctgatcaacttttcatatttcagactcattttgaaacccaccttttattttatactatgttactttattacccttcgcagtacctgtgatcagttttcttgcattttccatatcacaagtgtcttttttactgaacttatcataacacaaaaagcagaccgttaaggtctgctttcataaatggtcgttttttctacataaactgttttaataacattttttattttgattttttcaataatttcttatacgagaaatcgatcgcaaatgcgcccagcggagctgtcagcacaatcgctaaaacagccacagtaagaacggtatctccgcatgcaaatcccatcgcaagagggattccaccgattgcggcctgaactgttgctttcggtgtataagccatcatggcaaacaaccgttctatcttcttgagacttgttccaagaaggcagacggatacaccaagcatacgaaacaccaatgcacctacgataacaactaacgctttcacaccgatttttccaagatatccgacattcactgttgctcctacaagcacaaacagaaatacttctgctgccacccacagctttccatatttcacagaaatcctcttcgcaacaacttctctcttcttctgcaaaccgatcccaatgaacatgatcgcgatcaatgctgaaaatgtaatcgccgtattcaaactgtcttccataacaacaagcaacagagaaatactcaaaatgatcaacactttcgaggtatctcttatatgcactttcttaaagtaatacgcaagacatgtccctattaataatccaatcccaattccaaggaaaatagaaaccggaatattgataaaactgagtatagatgtactttgtccctgcatcattcctgtaaatgttgaaaacagcacgatgacatagacgtcatccacagatgcgcccgcaagaatcagctgcggaatcccctgtttcacgccatagccttcctccatcagcttcaccattctcggtactacaacagccggtgaaactgctgcaagcacagctcccatgattgcagcttcaagtatagataatcccatcagcttcggagccagcagtacaattccaacaatctcaaacgttgccggaacaaaacacatcatcacagccggtcttccgatctttttaagtcctgaaagatccagaccaagaccggctcttgtaaggatgataatcagcgcgatctttcgaagctcggctgagattccaagaatactgtcatccaacagattcagtacatatgggccgagtatcatccccgtgatcatcattccaagcaagcttggcagtttgattttcttacagatccagcccatagacattcctacaagcaagatcaaagcaatacttagtaacatctattaaattgcaagcaagttcttaattgcttccatgtaaatctgtactgcttcttcaacttcagatacgagtgtgtactcgtctgcaccgtggatgcggtaatctacgcccggtttctccggtccgaatgcgatgatattttttaaggacttcgcatatgttccaccaccgattactaacggtttgttctctgtatctcctgttacatctgtataagctttgtacagtgcctctacaagtggagactcttttgggaagaacaatggttttgtagttgtgtggatctcaatgcgtccgttctcgtcttcgagctttccttcgcacatcttgagcatatcttctacagaatatgttaccgggaatctgatatcgattgtagcggagatcacaccgtcttctttcttaacgattccgttacagaatgtaagctctccaaactcatctgcgcatttcagtccgattcctgatccgtcacatgctgtaccaatgtgtgagttatagaattctacgaaatcatcttcaaatccggcttttgcaagacagtcaaagataacacctgcagcattaactccaaatgccggtgtacttgcatgtgcagatactccctttgcataaatagtgatctttccatcttcctctgttactttgtattcctgaagttttgtctctgcgaaagcagcttccagtctgtctttcagtccttcttctgccggaatctctgctgtacatgcatcacatacggcattgaatacaaatccaccattgatagaaataatctttgtattcttagaagttgccagcatgccaagcatacctttctctccgtgaatacatgggtaatttgcatccggtgtaaatccacaagataactcttccgccacttcattataatgctccatacatctggaaccattttcctcattacatcccatgatcagacgaactctcttgttgagcttcacacctgaatcacgaagaagcttcattgcataaagcgcttccataacaggtcctttatcatctgttgttccacgtccgtaaacgtaatctccttctcttgtcaacttgaatggatcatatgtccagtcaccacccgccggtacgatatccagatgtcctgcgataccaacgatctcttcgccttctcccatctctgcatatccacagtagttatccaggttcactgtcttgaatccgagttcatctgcaatctgcagtgcttcgtgaagaacctttgccggtccctctccaaatggcattccttctgccggtgttccaagctgtgaatctatcgctacaagtctttccatattgcttaacaattcttctgttgttgcatgaatcttttctttgatatccattattttcatccttccttttttactgccttctatcatatgatgcgagtgtcaaaagtaaattttgccactcactgatgtaaccggattgctccattgctatgcaattcccgcaatcctcgaacacatcaaactcccataaaatggtgtgttcacaccattttattccgttttcggtgttcggcgtgtcaaaaagtataaattgcttatttgtgcgagcacaaacgcaatttatactttttgacacttacatcatcatatcatgtatcgtgaaaaatttccagtcttcccttaacgaaattatcgacatttcgtctataatctggattaaacaattcttcagttttagattatattctcttaataaattttacttttctttagctttcgtgacacgaggtgttcacaattcttccgtataataacatcatcaagttgatacaaatgaattacaaaagtatcatacatagaaaagaagacggtgattgtattagcgacagatcttttatgattgccggacttcgaccaaaaattacgaatagtttatatagataatggcccggtgcagtgcaccgggccacgtttttgttattatattttcttaacctctttttccatttttcagatcttccacgatttcattgtaacgttttttattcaaacgatagaagaacagaacaactgctgtgacaatccacaaaattcctggaattgttgaaaatgcatgtttcataactgcaattacttccggattctgtacctgatttgccacatatccatatttaccaagcagagctgcaaggagtgcagttcctatagccattccgattttatttccaagagaaacaaatgcatactggaatccatcatttctaagtcctgttttccactcaccgtattccacacaatccggaatgatcgcatagattgcagtgttaaatcctgaaaagaagaactgtgtaatacctgccaatgcatagaatacaattggagattcttttacattaaagaagaacattacaagcatagcgattcctgtaagtaatgcaaaaacagatgctgttcttcctttattattcaacttgcggaatactggctggaagcaagctgcaccgataattgaaggaataataatacacatggaatatgttgtataataggaagcatctccttctacataagtgaaataatataaaatatctgcatttcttccatataatgtgaatccaaacagcacctgtccaactaatgcaagcagatatggtctattctgcataacggccttcagttgtactttaatggagattttttctttctccggaattgtcacctgctcttttgtctttgcaaaacagaagaaatgacatgcagcaaagatgcatccgtaaataattgcaacaaacagataaccgttctttacactgttgcttccaagcctgctgatcaatggcactgttacgatattgatgattccgattgcaatcattgctgctacggaacgagatgtattgatcttggcacgctcatcaatatcctgtgtcatagcaccgcaaagtgttccatatggaatgtttacacaggtgtatcctaagacgagaagacagtatgtaattaccatgtaaactattttcgatgtatttgaccaatctgggtgcgcccagaaagaaaggatcaaaagcactgatgtgatcggtgctgccaccaacagccatggacggtatcttccccatcttgtgtttgttttatctgttaatccacctacgattggatcattgaccgcatcccagaatcttgagaaaagcatcaatgctgatactgctgccatactgattccaaatacatctgtatagaaaatcattaaaaagttactgacaaacatccagctaaagttacatcctacatctccgaaaccatatgcaatcttgctgatcagaggcacttttccattattactctcgttttccattaattacctcctagtcagagtttctgataaaactctgtcctctcttgattcgatcacctatttctcctgcacattgatgattactttcatcgttgtctcgcggttatcatcaatatactgatatgctttcagataatctttgaatgcaaatgtcttagaaatcaatggtcttaaatgaacttttccttcatttacaagttctataccatctacataatcatcatgacgatacatcattgtgctcttgatatccagttcgtgatcatttgcaactgcaaggtctactgttgccattcccgcaaatacggcaacaagaacgatgatacttccttttcttgcgtatttaattgcctgtcccattgtgatattatttcctgcgcaatcatagatcacatctgccttgtcaggaccaaaggcttcaaccattgcctcgccaaagtccttctccatagtattaacgcatacatcaataccacattcttttgccttatccagacgaaggtcgctgacatctgtgatcattacctttgcggcacccattccttttgccgcctgtgcaaccaggttaccgatcggtcctgcaccaagaactgcaatattcaatccctttacatctcctacctgcttcactccatgcactgcaactgccagaggctcgatcatggcaccttcttcataagacatatcttccggaatcggtgttactttagaggcatctactgcaaaatattctgaagctgttcctgttgtctggaatcccataaccttaagttcctcacaaaggttatattttccatggcggcacggataacactgtccgcagtaaacctgtggctcgatcgtaactttctgtccttcatgaaattctgtaacatcttttccgaccttggcaatctcaccggatacctcatgtccctgagtcaccgggtattttgtaaatggatgctttccatgatatacgtgaatatcagatccacagattccaatattcataatcttaactagtacctgatcatctttcacttccggaaccggtacctctctgaaaataatttctcccgggtttgtcattacctgctgtaacataatgttttcctcctttattgaatatcttttattaaatgttttattaaagtaattacattattgttcaggaaatgtattttgtcaatatgttattgttcagttctgcctattgcacaagattttgctatattttttatgcactttgcgcaaaaaaagtccagggaagaaacatgtattaaaaatgtttcttctctggattttctaactttccatcattctgatcgttataatgttttaataaaagcctgcaaataatgttttgccacaccaactgccgaggcttctctcttatatgaacaaactttcaggtatctcgcatcatgctcaaatccattatattccattacttttttccctaaggttatcatatgatctgcaagatatccccctacttctcctccaagaataatatccatatcatatgccattctcagatttgaaataaggattgccagattattaagatactctttccaaaccttcacagcctgtccgtcctgctcttccaccttcttcataaactgttccagtgtctctttggtatcatctgtcagcacgctcgccgcacagtaagcatccgcacagccttgttttccgcaataacatttctttccgcccggaacaaggatcatatgtccaaattctccggctttctgattcgctcccggaatcaatttcccgtcaatgcaaaatgctcctccgagtgtgttattcaatgaaagatacaatgcatttctatagttatttaaatcctctgccatcattgccgcattggcatcattttcaaaataaaccggaagcgaaaagatctgttccaaaaagcttaaactataattctccaattggagcgcatgagatttgatcagcattcgttctttcgaattaacaattcccggaattgaaattccgattcccaagattcgttctctgttttctacatctgaaagaaatctttccaatgcttcgctcaattgtaagtagtaagcggcctctgttgaaaattctaagcggatcctttcatatttctctatctcatagctcaaattcacaagtacaaatcctgcatgcttcgcagtgatccttatcccaaccgcataacggtacgctggattaatactgattcgttttgcttttcgcccgcctgtagattcatattctccggtttcaaccgcaattccattagccaaaagctcattcacattcgacaatacagtcggcatactaagattgagatccttcgacaattccactttagacgttgcttcgtgatttataatataatttactatttttgattttgtaatatttctcttttccgctccggccatatccaaggctccttttataaattgttttataaaagtatcttatcccttctttgccggtttgtaaaggttacaaatgcattttattcttctactttcaccggatttgtcacactgaccttgtgatcataccatgttcccttttttccgatcaatgcaagatcaaattctttgtccagtgccggaaccggaacgtcgaatccatagacctcatcagatgttccatcgctgtaattaatagtatctgttgtaggctgaagcagttctgcgccatccttctgtgcatcctcggcagttccttcgaacagattgacaatatttttagacaccagactgatatgaattgtcattttcccatcctctactgtcagtgttccttttccatccattgcttcattcacatggaacatagaactgtccgtctgaaattctgctgtatatgttccgtcttccagtgctgcctgctcctcatctgccttatctgcagaatcctcttttgtatccgcctgttctgtctgtgcttttccactgtctttcgtctctgtgctatttccacatcctgtaaatacagatgcgatcatagaaacagaaattaataccattaatagcttctttttcatctaaatccttcctttcattaattcaaaaaaggtcatgccattcccttttctctgaacaagcatgaccttctcaatatcttcttacaaattactctgcatcaattgcagcctgtgtatgtgctacatacagctgctggattgcctggatctctcctaaacctgcaatctgagtatcaatgctgtcaaatgctcctgatgcctcaaactggctcttccaggaatcatcgtcatctccggccatatcgttgttcgcatggtctcctgcaacaaccatcagcggacgaaggattactttcttatatcctgcttctttcagtttctcgatcactgcctcgcaggatgtatcttccggctcaccctctacagttccgataaatacattgtcatatccaagctgttccatctgtgtctgcatctgagaataacttacctttgcagtatgagatgtaccatgtcccatgaatacaaatgctgttccgtcttcttttactgcatccagactgtcaaatcctgcatctttaacagcctctgctgtgattgcttctgctactgctgtcttatctgcattaataactgttgcatcagctccaacctctccgagaagtggctctgcaatcttaacagattcaaacttatctttatatccctctaatgctgctgtaagttcatcatattctgctccatgcatcagatgtgtcggctgtacaacaaggttcttcactccattgtctacagctctctgcaatgcctgatccacattgtcgatcttctcgccatcacgggcctgtacatgattgatgatgatctgtgctgtgaatgctcttcttacagaccagtccggataagctgcctgaactgccttctcaataccaccgatatctgtcgcacggctgtcattgaaggatgttccaaaacttactacaagaatttcattttcaccgatctcatcagagttgagcggatcatccttggatgcatctcctgtatctcttccgaaataatccggatccgcattctctccctcaacaagttctttctgtgcatctgtcagtgcatcccatgcttctttcgctgctgtacactgctcatctgtcttgtctgttctttcctgaacataaatgtcatcgatcagcttcgcaactttatctgctgcttcctgatcactgtcctgtttagactctgtctttgttgtgtcagtgttgttgtcgccctttgatccacatcctgcaatcatggacacactaagtgttgctgccagtaaaaccattaatactttctttttcattgtcaccctcctgatttcttatctcagaaatgaaaacaccctcgaatcaaacgagggtacgcaaagaaaaaccggtgatcatttacaatctatctgtaaataattactgcggtctaaatcattttctttcgtacggccaattcctcgtggcatgaattcttcattcctgtactgcgaaaggcaggtctcccggctgatcgttcaaatgcttctgcttcaccttcccggtctcccagtggtctcaaaacacaagctcacgaaatacggtgacgagttcgtacaggattctcacctgtttcccttttcaccagtccagattttccacgtcgttcctctgatcattcataatcaggacgccatcatccatctgactgacacctcacgcatctgtattaaattatatgttacaacggggtcattctatcacacttacacaaatgcgtcaagaaatgttataaattggaggatttggcctcatttccgactttgatttcctcagcaaaaatgatacaatatccctcagagacaaaatttgtaactaaggtggtttattattatgaaagaatctaatagccaggcatttcgtcgtggttttcgcgatggaattccgatcggtcttggatatcttgcggtctccttttcaatcggtattgccgcaagaaatatcggcctgaatgcatttcagggattccttatgagtctgttaaataatgcatctgccggagagtatgccggactaactgtaattgctgcaaactctccttatattgaggtcgcaattgtcacattgatcacgaatgcacgttatcttctgatgagctgtgccatgagtcagcgtttgagtcccgacctttcgttaggacaccgtctgctgatgagttatgatatcacagacgaactttttggaattgcgatcagcagaccaggtactttaaacccttattatacctatggcgcgatggtaactccgcttccgggctgggcttttggaactatgctcggtgtcattgccggaaatatcatgtcaccgcgtatggtcagtgcatttagtgttgccctctttggaatgtttatcgctatcatcattcctccttcgaagcagaataaagtcgttgcgggactggttactcttgcatttatctcaagcttcgcagcaacttgcctgccttggatctccactctgtcggatggtaccagaacaattatactgaccgtcgtactttcagccggagcagcattcttcttccctataccgacagaagatgaaacttcagcttcaactaagcaataataaaaacgtaactattcaattactcagaaggaataaaaattatgacacacaatatttatatttatattcttatcatgggcggtatctcttatttaatccgcgtactgccgatgaccttgattcgaaaacctttgaagaaccagtttcttcagtcctttctatactatgtaccttatgtcacactagcagtaatgacattcccggcgatccttcatgccacacagtctccaatctccggagttctcgctctcattgttggagttgtagccgcatggtgtggtgccggactgctgccggtcgcagttctttgctgcgtagttgtatttattgcagagcttttcctgtagagtaatcttatagattttagtaactgtcgatgcccttttttctgccattgatgcttttttcgctactgtcgatgccctttttcgtttggcgaaatgaatttttttaattttctgacatttaagacaatttctttaaaaagtctaacgcaaaaatatcaaaaaaggggttgcatttttctgtagctttgatataataaccatgttgtttgaaacaagcaacaaacaaaactcaagtaatgcggaatggtgtaattggcagcacagcagactctgactctgttagtaggggttcaagtcccttttccgtagctgggaatttgcttcggcaagttccctattttatcggagtgtggctcagtttggtagagcgctacgttcgggacgtagaggtcgcaagttcgaatcttgtcactccgatgttttaagagattacaatttgtaatctcttttttgttatagtctctttgttattaagtcaatattataaacaaaatgcgttgacctcaaattcacaaaaatgaaaatcggtcaacgcaccatcattatctattcatcaaatctttattttagctccccatcaaatacaacggttgccggtcctgtcatataaactgtgttcttctcctgatcccactgaatctccaaatctccgccaagaagctttacagttacttcatcttctgtcaatccattcagaatacaggaaacagctacagcacatgctcctgttccgcaggcaagtgtctccgcagatcctctctcccaaacacgcatctgtacagtatgtctatccagtacttttacaaactctgtgttcacacgtcttggaaatctctcatggctttcgaattttggtccgatttcttcaatcggaagattatcaacatcatctacataaacaactgcgtgcggatttcccatagatacgcaagtcatatgatattcttttccatccacaagaatcggttcatctacagccttatcaccctcagccacaaccggaatttctgccggtgtcaagattgggcttcccatatcaactcgaaccttcgcaacttttccattttctacgaaaagctgaagtgttttgattcctgctaaagtctcaactgtaatctctgttttgtcagtcaggccgtaatcatacatatattttccaacacagcgaactccatttccacacatttctcctctagagccatccgcattatacatggccatctcacagtctgccacttccgacggacagatcaggatcaatccatcggatcctattccaaaatgtctgtcactcacctggattgccaacgctgatggatcttctaccttctcttcaaaacagtttacatacacataatcatttccaattccctgcatttttgtaaatttcattctcttctccgttccactgtcatcactgacagtcctctcatttgttattgtttacagcacttcttattcgttactgttaacagctgcctcttattcattcataattgtcagcaccatctgtgctgtttcgagcatattggtcccactttccatactgctcttctgtaaatatcgatgtgcttcctcttctgacatgttatttcgttctatcagaagcgctttcgcctgatcgattatctttctctgagaatcgtctctctttcgtatcgtttctctgcgctttcttctcttcctgctctgtgtctgctgaatcatttcaacggtatttaccaaatcataaactttgattgggagtggaagtcctacaaccccatccggcagtccatccatccacttatccgctgaagccaccaaaagcatgtcaaacgtatccggaagagattctcgtaaatctgtatactgcatatcttgaaaccgataaccacacacgacaattccatcgttccagttatcagcatactgcaaaaccttagctcctgtcaaacataccgcagatacttcaatacccgcacgaaccaaactattacggatatttactgcattttccctctttggaaaaacgacaataatgttgctcatatctgctcacctcttccgctaactactcttctatcaatccgttctctctaaatgcccaatgccaggatacctgaactacagcctgtaaagataatgatcgatctcccagtctgtcacctgcatacaatattctttatattctttcttatttgcttttatgatcttctcggcaagctctttccctaatacgctgatcagcagttcatctttctcaagctctgctgtagcagccccaagcgttctcggcagttcttccacttgaagttcatctcttctttcctgcgtcatcttctgaatattctcatcaatattcttcggaggcataatctgattcttaattccgtccaccccggctttcagaagtactgcaagcgccagatatggattcgccgtagcatccggactgcgaagttccagtcttgaattgtcttctttctccatagacacacgaatcaaaggtcctcttgtcttagctgaccatcccatataaacaggtgcttcataccccggcacaaaacgtttataagaattgatcgttggatttgtaatacaggtgattgccttcatatgtttcatcaagccaccaataaaataatatccttcctggctgagtccgttctcatcctctgcgttataaagtgcatttgttccatcgcttttatataaagacaaattaatgtgcattcctgacccataagtctcactcttcggctttggcataaatgtcgcgtgcagaccgtgtcgttttgcgattgtcttaacaaccatcttaaatgtcatcagattatctgctgtaatcatcgcctcatcgtggtgaaagtcgatttcatgttgcgccggcgcaatctcatgatgtgaggaaataatctcaaaccccatatcttctaatgttaagatcatatctcttctcgcattttctccaagatccaatggccctacatcaaaatatcctccctgctcgtgagttactgttgtcggtctaccgtcatcatctgtatggaaaaggaagaactcgcattccgggccgacattcatcgtatatcccatctctttcgcctccgcaacagcctttctgagtacataacgcggatcgccttcatacggtgttccatcttttttatacacatcacagatcagtcttgcaacttttccctgctgtggtctccatggaaagatttcaaatgtactcaaatccggatataaatacatatctgattcttcctcatctgcaaccccttccaaggaagaaacatcaaacatacagcggttatccaatgctttttcaagctgtcctactgttaccgccatatttttcatcgttccaaaaatatctgtaaactgcaatctgatgaaagcgacatcttcttcctctactatgtgaaaaatatcatctcttgtatagttatgcattatttttcgacctcctttatcataaactgatacgataaaagggcgttctccacctaagttggaaacgcccttgtttctgtgttacattatatcgactgactgttttcttgtcaattatttctgaatcagttcaagaacttcttcttttacaggcattgctttgatcgcacccttctttgttgttacaagtgctgctgccgcattcgcaaatgtcagcatctctcctaactgttcctctgtcagattctcaaaatcatgatcaaccagataattcaaagaacttccacagaaagtatctcctgcaccggttgtctcaattgctttcactgaaaatcccggtctctctacgcgcatgcctttgtaataagctctacttccgtcttttcccatagtcagaagaatcagcggaatattgtatgtctcctgcagatatgcgattccctcatcatagtcttccttaccggatacaaactgaatttcattatcagagatcttcaggatatcacattttccaaatccatactccatctgctcttttgcaagatcaagagagctccacagcggcggtctcagatttggatcaaaggatacaaggcaaccatttgcttttgctgtttctaccgctttctttgtcgcttcacgcacaccttcatgtgtcatagaaagtgttccaaaatgaaagacttttgtatcttttactacttctggattcacttcatctgcagtaagcatcatatccgctcccggattacggtaaaatgagaactctctgtctccatccgggaatgtatgtacaaacgcaagtgttgtattcacattttcgtcaaccatcagattggaggcatcgattccggcttccgtaatcgtatctcttaataacgctccaaactgatcttttccaacttttcctataaatgctgtcttctttcccatcttgttcagaagtgccagcacattacacggtgcacctcccgggcaagcctcaaacatattgtttccctgctcgctttgtccattcattgtaaaatcaatcagaagctctcctaatgcgattacatcatatttctttgccatgaagttctcctcccatttcttgttttattactttgtcttattgcttgtcttaattaaaatatactaactcttcaattggttctgcaggctcaatattctctgcctcaagcaccggtccttctccgccgtatacggacagattcgcataacgcacttttgcacgaatttttacccagtctcccgcattcagcttcggcgcataagcgcttctgcaaacatatccaaggaaagatgtatcatctgcacagcaagtcattgccatacgccccggatagaataccttagacggaaatgcttttggtttcataacctttgcaacaaattctacaacttttcctttatagcgctccggatgctcctgcatatcaatataccagataccataatcttctcttggaatctcaatcacaggtgctttgagatcatatggtacttcgtcttcaaagatattgtctacctcaccgttctcatcctcaaagattacttctgcctgagggcttacaaccttaacactcctacggtatcctgccaacggtttcttatcctcgcaacggttgaacagaacaagctctgcgccctttaccatctctacaaacagtggttttaagtttgtcagatacatctgaaaagtacttgcatctaccgttgtgatcttctgctcaatagcccatcctgccggaagcttcatcttctcaaattcactcacctgccacataccgttatactcgataaccacacgttccggcttgtgcttcttattcatctcttccagccattcttctgtcagatcttctttatcttctacagtctcaataacaacaccatacttcagcaattctctcggatcatactcttcttctccctcttcgcagagaatcagaagtgtctttccatcaatctgaaagtaatcctgagatagtgtaaaattcaggaactgagttttaccactgtccaaaaaacctgtcatcagataaaccataacatctggctctttcatcatatctatctccattccgtctccttttcgcagaagacatctgttattacataatgctacacagcccccctatggggtactgctttgcttatcctttttatttcaccttaaataattctgcaagcttgtcttcgttaagctctgctccgatcacacagattcttcctgtgtattccggtgctcctgttcttacttcatgttcctctggaaccatatcaaagtagatccactcaccgtctgcacctgcaaccattccttttgcacggagtacatttccgtaagagccgtcctcttcaagagtcttcagaattgcactgacctcatcctttgtataagtatgaattgtctctttaccccagcttgtaaagacttcatctgcatgatgatggccttcatgatcgtggtgatgatggtgtccacagccgcagctgcactctccatcatgatgatggtgctcatgctcatgttcttcatgatcgtggtggtgatgctcgtgttcttcatggtcgtggtggtgatgctcgtgctcatgttcttcatgatcatggtggtgatgctcgtgttcacactcttcatggtcgtggtggtgatgctcgtgctcacactcttcatggtcgtggtgatgatgctcgtgttcatgctcatgtgcctcttcagctacttctgcaagcaattcctcttccagagatttgcttgattccattgtttcaagaatcttctcacccggaagctgctcgattggtgttgtaatgatcggagctttttcattcagttctcttaacagcgcaacgctttcctgaatcttctccggttttgctttatctgtacggcttaaaataactgcacctgcatattcaatctgattgctgaaaaattcgccaaagttcttacggtaaatcttgcactttgttacatctacaactgttgtaaagctattgagttctgcatcaatctcaccctgaacatcctgtacagccttgattacatcagaaagctttccaactcctgatggctcaatcagaatacgatccggatgataagtatctacgacctcatgaagagattttccaaaatctccaaccagtgaacaacagatacatcctgaattcatctcacgaatctcaattcctgcttccttcaaaaatccaccatcaataccgatctctccaaattcattctcgatcaatacaacctgctctcccttgtatgcgtcagaaagaagcttcttaattaaagttgtctttcctgctccaagaaatcctgaaataatgtcaatctttgtcattgttctcttctcctctttctattatttcaaatccaattcaaccgggcaatgatctgatcccataatatctgtaagtatcttcgcatcgtccagtctgtcctttaaactttccgagacacagaagtagtctatacgccagcctgcattcttcgccctggcactgaaacgataagaccaccaggaatagattcctgtctgctccggataaaagtaccggaatgtatcaataaatccggcatccagaagttcagtaaacttctgtctttcctcatccgtaaaacctgcattcttacggttggtcttcggattcttaagatcaatctctttgtgcgctacattcatatctccggtcacaatcaccggttttgtctcttctaacttcttcagataagtacggaagtcatcctcccacttcattctgtaatctaaccttgccagcccattctgagaattcggtgtgtatactgtgacgaaataaaactcttcaaactcacaggtgatcacgcgtccttcctggtcatgctcctcaataccgattccataactcaccgacaatggttctttctttgtaaacacagctgttccggaatatcccttctttacagcataattccaatactgataatagccttctaattccagatttagctgtccttcctgcatcttcgtctcttgaatacagaagatatccgcatctgcctcatgaaagaaatcaagaaatcctttctgtacacaggcacgaataccatttacattccatgatattaatttcaatacgctgcatcctccctttcaagagtgttgctgttcaccgtccattcgccaactcttctgtgaataatcagcaactttccataaccgaatcaataatacacctcatcaaggaataaccctcttgcaggtgctaaaaatccagcctgacttctatcttttgatttcaaaggttccttcacactctctatgcttcgtgctccggttccaacttccagcaaagttcctgtcaaaatccttaccatatggtaaagaaatcctgttccttcatattgaatactgactttgcttccttgtccgcaaatcattatagcataaattgttctttttgtggacttttcatcctttttatccgtatatccagcaaactcatacgtgccaatcaacaattgtgctgcctttctcatcgcatctaaatccaatctctgcggaaaatgatatgtatatcgtcttgtgaatacatctggtttctccgccaaatccagctgataaatgtatttttttccaactgcacttttcctcgcatgaaatccattcctcacaagctctgcatctaaaatccgaatatcttcaggtaatcttgaatttatcttttctgtaaaaaattcatcctccacccgaccagaaagaactactgttgcagtctgtccattcgcatgaacacctgcatctgttcgtcctgaaccatcaatctccactggatatcctgccactgacgaaattgttcgctccagagttccctgcaaagtgttctctgtgtttgcctgtctctgccatccctgatatgcagttccgtcataagcaattgttaatttataagttctcattctcgcctcccgtgtaacatactaacattctccgaaagattgaaatcggttatactcacgaacagagtataaccgatttttattatcttagaaatttcttcaattcatccataaatgtattcgcatctttgaactctctgtagacagatgcaaatctgacatatgcaaccggatccaatgtcttcagattctccataacaatttcaccaatctcactgcttgggatttctttctcttcacgattaaaaattgacagttcaatcgcatcaattgtcttttgaatcccttcagccggaaccggacgcttatagcatgcattcagaactccattctctatcttcgctctttcatactgttcacggttattatctttcttaattacaatcagtggaattgtctctaccttttcataagttgtaaaacgcttaccacattcatcacaggaacgtcttcttctgatagaactattatcctctgctggtctggaatcaatcactcttgtatctggattgccacaatatggacacttcatataatccactccgcctttccacgtatcttattgccttcattatacacaatgtctaatatttttgcaaaaacttttcttctttaatttccacaagaataatatccggtccaatcttctttatacatgcaaatggtatcacatattcgctatccgttccaaagaatccacagaactttcccggtcccggaacaatcaatgcttctatcgcaccggagcatacatttatctgcagatctactacacctccaaggcacttgccattgcagatattcacaacttccttttccttcaattcgcaaaatctcataggcattattccatgattgccgatattttctcttaactattctatgcatgaaatcagaatctgttgtataataaaaaaagtctcctttctgtctgatcgtaagacttctttttcccttaaaagcttgtccgataaatcggcaatgcattgattaccggttcctcatatggatgtacctctttaattacctgaattgtttcatccactttttctgtaaatacagtcacttcaactttcatttccggctcacaactaatctctcctacatttccaatgtaaggagaagttccatctaatggtctccagtaactggtgaccttggagcaggacatacaggaattataatttcctatatgaccagcatctactgactgcaatgctttctgtagctgcgaaatatgtgtttctggaataaagatttctaatttgcaatacttgaaatccatgcgacacacctcctcaatgcacaaacaaaatttatatcaaaatcccatcgcaatgatctatttcatgctgaatgatctgagccgtccatccactgtatttttctcttttctttttgaaattcatatcctgatattcaacttctatttcctgataacgtctgcagcttcgcactccatccaatgacagacaaccttcttccgtctcataagcgcctgtacgtttcacgattttcggattaaacatagcaatattaaacaaccccatattcactgcaatgattctcttttttactccgatcatattcgcagccattcctacacagcctgcttcatttgctttcagtgtatccagcagatctattgccacctgcttatccgcttctgttgccaattctgatttctgatttaagaaaaatatgtctctcataataggcttgatcatactattttacttcctttccattccctgcaaaccattctgtttctatagaaattttttcttctgttgctaagcttacataatattcatctatacatcttgtctcaataaaatattcctttgctttttcattttcccattctttgctaaacccaatgccttttactttcagcttcgcttctagttctgtccataattgagtaaatatccggtctttttcctccccacaaagttcagagattgcattttgtatttcattcgaaaatatcttcttcgctgtagcttcatgatacggacgcacacgttcaatatcaatgcctacttcctgatcagcaatcgctagaactacatatttaccgctatgtgacaggttaaaatgttttctcgcatccacaagcatcggcttcccatttttattcattactagctgagcatcattttctacacctaaatactcttttaaaagatatcccgctatcagctcctgttttttatccgtttctctcttatgcttctgatacttttcaacatatctttgtgctatctgtgagagaatccactcttccttacatgatattttttctatatcagctattatgattcttcccttggtcatttattgtcccatcttttctatatacttttttcaagaatgccaccagcatttttgccgtgagacacacaatcctcatctgttatatacatatagcaaaatcttttctttgtcaagaaacttgatttttttgcaagaaaaaaacagcgctttcgcactgcttctcatttctttctatattccatataccttcaaaactacatacagttaaaaccaacatcatcatccaaacctatcactgctttggttatgccctcgacctattagtaacagtcagctccatgtgttaccacacttccacctctgccctatctacctcgtcgtcttcaaggggtcttactaacttgacgttatgagatatctcatcttgaggggggcttcacgcttagatgccttcagcgtttatcccttcccggcttggctactctgctatgcctttggtaagacaacagatacaccagcggccagtccatcccggtcctctcgtactaaggacagctcctctcaaatatcttacgcccacgccggatagggaccgaactgtctcacgacgttctgaacccagctcgcgtaccgctttaatgggcgaacagcccaacccttgggacctacttcagccccaggatgcgatgagccgacatcgaggtgccaaaccactccgtcgatgtgaactcttgggagtgataagcctgttatccccagggtagcttttatccgttgagcgatggcaatcccactttataccaccggatcactaagtcctactttcgtacctgctccacccgtcggtgtcgcagtcaagctcccttctgcctttgcactcttcgaatggtttccaaccattctgagggaacctttgagcgcctccgataccctttcggaggcgaccgccccagtcaaactccccacctgacattgtcccccagccggatcacggctgctggttagaaacccagtactgcaagggtggtatcccaacattggctccatggcaactggcgttaccatttcctagcctcccacctatcctgtacatgcaataccgaatcccagtatcaagctggagtaaagctccatggggtctttccgtcctggcgcaggtaaccagcatcttcactggtatttcaatttcaccgggtgcattgttgagacagtgcccaaatcattacgcctttcgtgcgggtcggaacttacccgacaaggaatttcgctaccttaggaccgttatagttacggccgccgtttactggggcttaagttcaaagcttcgcttgcgctaacctctccccttaaccttccagcaccgggcaggcgtcagcccatatacctcacctttcggttttgcatagacctgtgtttttgctaaacagttgcttgggccaattctctgcggccatcttactggcactccttctcccgaagttacggagtcattttgccgagttccttaacaatgcttctcccgtcggccttaggattctctcctcatccacctgtgtcggtttacggtacgggtatcctgcaaacaatagcggcttttcttgacagtcagctcacgtgcttccctacttattttcagtccacatcacgtcttcagattaaagagcggatttgccaactcttctcctacctcgcttgtaccggtctttccattcccggctcacgctctctgcctgtgtccccacagttctgttacaggatagtacaggaatttcaacctgttatccatcgactacgtctttcgacctcgccttaggccccgacttacccagagcagatcagctttactctggaaaccttagatattcggccggaaggattcccaccttcctctcgctactcattccggcattctctcttcttaaaagtccacagctccttacggtactgcttcatccctttaagaatgctcctctaccaattgaattaattcaattccaaagcttcggcagtgtgttttagccccggacattttcggcgcaggacctctcgactagtgagctattacgcactctttgaatgaatggctgcttctgagccaacatcctagttgtcttcgaaatcccacatccttttccacttaacacacattttggggccttagctgttggtctgggctctttcccttttgaccacccaacttatctcggatcgtctgactcccatacatcatctacacggcattcggagtttgatatcccttagtaagctttgacgcccccttaggaattcagtgctctacctccgcaagactcgtatgaggctagccctaaagctatttcgaggagaaccagctatctccgggttcgattggaatttctcccctatccacacctcatccccacccttttcaacggatgtgggttcggtcctccattgccttttacggcaacttcaacctggacatggatagatcacccggtttcgggtctactccgactgactatgcgccctattcagacttggtttcccttcggctccggacctttagtccttaacctcgccagccagcgtaactcgccggaccgttctacaaaaagtacgcggttgagcatataaagctcttccacagcttgtaaacatatggtttcaggttctttttcactcccctcccggggtccttttcacctttccttcacagtactatgcgctatcggtcactaagtagtatttagccttacggggtggtccccgcatcttcccacaaggttccacgtgtctcgtggtactctggatcccgccatgtcaactcgtctttcgcttacggggctttcaccctctctggccggctttcccaaaaccgttctgctaaactcgttgaatcaattccgcggtccgaaccccagcatgcacgcacgctggtttgggctcttccgttttcgctcgccgctactcacagaatcacatgttgttttctcttcctccggctacttagatgtttcagttcaccgggttcccttccttaagttatgtattggcttaaggatacttgaggtttgctcaagtaggtttccccattcagaaatctccggatcaaaggatatttgctcctccccgaagcttttcgcagcttatcacgtctttcatcggctcttagtgccaaggcatccaccatacgctcttatcagcataaccaactcgacctcatcccacgggaatgggataatgtccacacatacatagcgttgtatgcgttggtgatagtcaatttattttaagtctgttttcttcagactgtaagttaatgttgttaacattacctcggatgtcttgattagatatttatctaaatctattgatttttactatatgcagttttcaaggtacataaagatgcgagcgtatcgaaaacagttgtacgtgacaagcttgcttgtctaagtgcaaatgcttttcgatgcattggcatgtaatgccatgagcgataaaaccgtaggttttagagcttcgcatcttgaccgactttcatcagtcattacatacacaaatctctttgtatatctaatcactggtgaaaccagctatcataacagcactgccctgctgattgggttggcggtgataagttgttgctcatctttgcctgtatctatatgttcaactccggcagcgtctctgccttagtttctttcttttaatttggcggccacctactctcccacaccgtctccagtgcagtaccatcggccgcttaggtctttaccatcgtgttcgggatgggaacgggtgttacccctaagcgcatcgccaccaaaagctttggttacttgataacccaacaatagacaacagtaaaaactctctacttctttcttccgttttagttggattgttccagacgaaagaaagcatttcttccttagaaaggaggtgatccagccgcaccttccgatacggctaccttgttacgacttcaccccagttatcggtcccaccttcggcagctccctccttacggttgggtcactgacttcgggcgttactgactcccatggtgtgacgggcggtgtgtacaagacccgggaacgtattcaccgcgacattctgatttgcgattactagcgattccagcttcatgtagtcgagttgcagactacaatccgaactgagacgttatttttgggatttgctcgacctcgcggttctgcctccctttgtttacgccattgtagcacgtgtgtagccctgctcataaggggcatgatgatttgacgtcatccccaccttcctccaggttatccctggcagtctctctagagtgcccggcctgaccgctggctactaaagataggggttgcgctcgttgcgggacttaacccaacatctcacgacacgagctgacgacaaccatgcaccacctgtcatccctgtcccgaaggaaaggcaacattacttgccggtcagggagatgtcaagagcaggtaaggttcttcgcgttgcttcgaattaaaccacatgctccaccgcttgtgcgggtccccgtcaattcctttgagtttcattcttgcgaacgtactccccaggtggactacttattgcgtttgctgcggcaccgaacagctttgctgcccgacacctagtagtcatcgtttacggcgtggactaccagggtatctaatcctgtttgctccccacgctttcgagcctcaacgtcagttaccgtccagtaagccgccttcgccactggtgttcctcctaatatctacgcatttcaccgctacactaggaattccgcttacctctccggtactccagattgacagtttccaatgcagtcccggggttgagccccgggttttcacatcagacttgccactccgtctacgctccctttacacccagtaaatccggataacgcttgcaccatacgtattaccgcggctgctggcacgtatttagccggtgcttcttagtcaggtaccgtcattttcttccctgctgatagagctttacataccgaaatacttcatcgctcacgcggcgtcgctgcatcagggtttcccccattgtgcaatattccccactgctgcctcccgtaggagtttgggccgtgtctcagtcccaatgtggccggtcaccctctcaggtcggctactgatcgtcggcttggtaggccgttaccccaccaactacctaatcagacgcgggtccatctcataccaccggagtttttacccctgcaccatgcggtgctgtggtcttatgcggtattagcagtcatttctaactgttatccccctgtatgaggcaggttacccacgcgttactcacccgtccgccactcagtcaccaagatcttcatccgaagaatcaaatcaaggtgcttcgttcgacttgcatgtgttaagcacgccgccagcgttcatcctgagccaggatcaaactctcgttaaaagtgtttgtatccagttcagaaccaactaactagctaattcttccctttttactgttgttttggtttgtttaaaaaccgttcttaaaaatcttctcttaaagaaattttcaagggttgttgttgtctattgttcagttatcaaggttctttgtttgtgtcgttcttttcaagcgacagcttctatattttatcaaaagcttttgtctttgtcaagaacttttttatttttctttgtcgctcttttcgagctttcctttgccgtctcacgcgacagcctatttaggatatcactttcagaactctttgtcaacaacttttttgatttatttttcaatcatttcattgatttttaaatcttccagtttccttccgatcaagaatgtcccgcctccgcgtcttctttcatcttccgttcctctgttgttttccttgctgttcctcagcgacgaatgttatcttatcacagctgtttttaattgtcaatgttttttatatatttcatgcaattcagaatattctgaaaattagcatctgcgttccccgaccctaacagattttgcaagcttgcttgcaataaactggtaggggtggggaacatagggcgaatgcccttaaccgaaaggacgtcagttctttcggttgttgcagatgcgtaacatacatttcaaaacacgacagctattgcaagcttgcttgcagtaagctggtagggttgggaaacatagggcgaatgcccttaaccgaaaggacgtcagttctttcggttgttgcagatgcgtaaactgcgttcccacagccaatgacaggtataagcggcataccttgtgaaatccattatttttctgtataatcaatctcatctatttatttcacttataaaggcacaggagacacaatatgtttcattattatatgttcaataaaccttttggctgcgtcactgcccgccgtgatagcctttacccaaccgttatggactatttttcagagttaaacaatgataatttaaatccggttggacgattagaccgagaaaccacaggactcctcctcattacagatgacggagttttcaaccagaaacttacgcacccttcttatcataaagagaaaacctatcattttacagttctcggtgatttaaccgaggatcggtgccaacaattagaaaaaggaatcctcttaaaagggtcccctgttcttacttctcctgcgaaactaaaagtatttcgtcaggatattctttctaatataatagatactttgcatccagaagtacaaaatgccgtatgtaataacctcccaactcatccggtcacttacggagagatcacaatcagtgaagggcgtaagcgtcagattcgccgcatgatgaaagcggttcactgctgcgtaattgaattgaaacgcatttctatagaagatattattctcgatgagacactttctcccggagaatggaaagagatttttccactataacaggaaaaatctcttttttatcttcgtatatcatttaaatccaattataatctccaccggtaattgccagactcagaagtgaatccatcttctcaacttcctcttctcctgtaatcttctccaccaacacagctgtatcctccgctgcttccaaagtttcatccggtccaatttcatagtcaatatccatcccacaatccggacaaggaattgtattcattgtctgcagtgataaaaatcgacttccacattttttacattcataatatccgcactcttttgtgccatctggtacataatacataattttctacctcactctcttcatcttacaagtactttttatcttatcactcaaaaaagaagaccgcaagcaacttatttcgttgcgcaaccttatctcttcctaagatttgtaatcaaaaaccgattggtttttcttgacaaactcaacttttttatgctatatctactataactctttgcactgcatataaatctacagtacaaactgagcagaccgtgatatcatatcatggagtcgggtcgcagatgcgacagtggaatctttcatccgcgggacagtagttgctaatactgattcgtgggtgtttttattttaaaacaattcttttattttcccacatatatttagtgccatagagctatcttttaattgttttattaaattggaggtaacacatatggaaaacagcacaatgaaaaccggaaatcctgtcgcaaatgaagaagatttccaaaaagtagccaacaaagtctctactattacgattgtcggaaacatcgcactatctctgctcaaactttttgccggaattgttgcgcattccaatgcgatgatcagcgatgctattcattccgcatcagatgtattcagtacatttatagttattatcggaatcagactcgcatcaaaaaaaccggacaaagaacatccctatggacatgaacgcctagagtgtgtagctgcaattgtccttgcaatcgttcttcttatcacaggccttggaatcggaatcgaagcattcaaaacgatattgcagggaaattctgacaacatacaaacaccaggtatcttagcactgattgccgccataatttcaattgcaagtaaagaggcaatgtactggtacaccagatatcatgccaagagaatcgattccagtgcactgatggcagatgcctggcaccatcgttccgatgcattttcttccatcggcgcattggtcggaatcgccggttcaagacttggatttccaatcatggactccattgccagcttagtgatttttgtatttatcgtaaaggctgcttccgatattttcaaagatgcaatcgacaaaatggttgaccactcctgtgacgaagaaatggagactcaacttcgcaactgcgtaatgcgcaatccaaatgttcataagattgacgtacttcgaactcgaatttttggaaataaaatctatgttgatgttgaaattgctctggatggctccatcacacttcaggatgcacatgatgtggccgaaaaagtgcataacgatatcgaaaagacttttcctaaagtaaaacatatcatggttcatgtaaatcctgcaaaattataagtaacaagctttctctttccatgaaggaatcctcgtcaatgacgagggtttcttcaacgactggcagttcctgcttaaaattcatttaatcatgttctttaatatattgaaatacccttttgtcactctttgattttttataccatccaatacataccattataatcccaacaataataaccgtagttcttaccgatgaattcggtgaaaataagcaagatacaataattccggttccagcacctgtaaaaaaatctacaacagatttttcgtgctttattgttcccatcactctttctttatctatagattgtactctttttgaaactttttatgccataaattcatctaataagtatcaatcggttgagatgaagcttgaaaacaattgaaagaaggtggcgtataaaatgaaatctcttgtaaagcgggcgcaaaggggagatgatcaggcgttcgtggaattgatagaagaaaataagcaggccatgtataaagtagcggtcggtattttaaaaaacgattttgatgcagcagatgcaattcaggaaagcatccttacttgctatgaaaagctgaaagaattaaaaaaagctcagtattttaagacatggctgctcagaatattaatcaataattgtaatcagatgcttagagaacagaagaaagtagtcggaattgaggactattatggggcagaagatacaaaaggaaagaaagcagaagaaaagattgcagcacaaccgggagcagcaacaatcaatgaagactttctggagctgttagaccagatggaacagcaatatcgggttgtattgattttatattatgtagaagagatgagcatacgggaaatcagtcaaatactacagatgaatgaaaacacagtgaagacaagactttccaggggccgaggagtatataaaaagctatacctgaaagaacacccggaattccaatttgaatagaggatgcttttagaatgcagctgatagaaaatgcaagcaaaaaggaggttttgatgatgtcatttgaggaaaagatgaaaaaagaattgaaaaaaaacctggaaatcccagatgttgtagaacagaaaattcaggatgcatataaagaaatcggacaggggaatgttacgatgaaaaaactaaacaatggtaatcagaagaagagaaaagcatggacagcggcagcagcagcggtagcagtaatcgcagtatcaggaagcgtattttatgcaaatccagtactggcgaaaaatattccagtgattggagatgtctttgcaaaactgcagaaaaacaaggaaaataatccatacggtgaaaaggataagacagcatatggaaaaattgcagacaattcagaaagtgtgcagaatccgggatcagaagcagaaagcaatggcgtgacagtaacaatatcagatgcgtattgtgatggatatgaaatgtattttactatgacagcaacaacagataacgatcaggtaaatcagaaggactatttattgcctgagaaaagccagcgggtttatgtaaatggggaagagaccggagctgaattatccttggagaaaacagaagatggaagctttgtcggattggggcatatcagtgccggatggttggctgacaaaacatttaaagatctgtccactgtagatattaaattcactgagttgtatgcaaaggtagagaatcaacctgaaccggcaacttatgtagaaggtgaaaatctgatcacaggtcagtggaatcttgagtttacggtagacacagacacaaacctgttaaatacttatgaggtaaatacagaaaacaatggatttacagtaagtaagattgtgaaagcaccggcatccacttatttgtatcttgaagtaccggaagaatatgaaaatgtacagatgattcttacagatgctgatggaaacaaactggaaaaattcggtggaacaacaacagatccagaaaatgggatgtatgagatccagcttcagtttgagcagacagatacaaaccagattcatgttcaggttatagatatggatcagagtacgaacgacaatctggctatggttgcagaaatgacagccaatctgaattaaaatagattaaaaatacgtatcataacatttggatacttcctttgggatgtattttggaaagagggaaccggttcttgccaggaaggggttccttctttttattataatccctttgtaaagtgaaaaaatcatacagtaaatcactacacactctcatcattcatccctcttatctattccactctcttttaattcatcctcacttattgcatgaagtgttgctttattctcttttgttccatcaaaaagtacttcgcttaaaacatctgttttagtttcatttttatatattaccgtttcattataaaaattgctttctattgtaatattcccattgtcaatatcactcatatctaatttaaaataatttgcatatgatttatctttcatagacccttctatttggattaatgcctcatcacttttccatgttaatccaacaagttctggtacgtcataattaaagcttactacataaattgttttgaaactttttataccataaattcatctaataagtatcaatcggtctgggaaaatgattcttggagcaatgatcagacttatagatatcgtagcattattaatgctgattccacggataaaaggactgaaacaaaaaattgatggggacgggaaaagtccccgtttgctaagtaatcgaaaacatgttatacagtttcatcatttttatatcatgttttgaaatatggagtttctctctgaattcaggagtatcattttgcggttctttggtaataagaactttggtagcaatcggcatcattggtcgggaagaaatcccataaaaaagtccccattttatcttagcatcaaggaaagaggcaagtacagtaatgttgatttgttccatttcagtatcttgattttgaagaataagattactcatagcatcatagtgtttcaagtagccaaagtaagtgttctcacagttctgataatgcacataatcttcaatattcatatacagcataattttataagttcctggattcgatggggtcaggacatctacaacacatcggttgacagaattatcacgaccatcataataataaatataaaactgggaaacatccctaaaaaaagcaggggcattactcaatgatttttttggaacttgagcgggttcactgtagagcagttgttctacatggacaccaagcgcttcggcaatttcataaagtgtaacaatatcaattgtaatctgaccgttttcatatttggaaacggttgctttacttttacatagaatatctgcaaattctacaagagttagtcctcttttttttctaaagaatttaatcttatttccaatttctaaaggtaaattcgtcatattttacaatcctcggtttcgttaaaatagaaattcatataaaaaaaataaatactggagatatttgtttttattattacataaaaacagtaaaaagtctattttaaagagaataaacatgtaaaaagtttcttctaagtagaaaaacaggattttgaacagggagaactaaggtgttatggtgtaattacaataaaacaaaggagaaaaaaggatgaaaacagaattaaaaagatcatatgatttcgatgaaatcatcgagagacgacataccaatgcactgaatactgatggatttcgcagctatattttccatgcaggaccagaaaaaaaattcccctataaagacgaagaatttgtccgtatgtgggtcgctgatatggaatttgcaacaccaccggaaatctgtgaagcgatgaaaaagcgtatagataagagaatttttggatacagtatggtgtttgattcggattattataatgtattacaaaaatggtgcagagaaaaatatgattgggagtttccaagaaaagagttatgtttttcaagtggaatcatcccagcactatatgaattgacggaagatctgctgagtaaaaatgaaaagatgatgattgttacaccggcatatggatatttcaaacatactgcagaatataacaatgtagaattggtgtgttcaaatctgaaaaatgatggaggagaattcacaatcgattttgacgattttgaaaagaaagcgtctgatccacacatgaagcttatactctggtgcaatcctcataatccgactggaagaatgtggacagcacaggaattaactaaggtagcgaaaattgttgaaaaatataatctatggattatttcggatgaaattcactgtgatttgattagaaaaaataataaacatattccaatgggaaaaatcatgaaggactataaaaaattgattacttgtatgtctgcaagtaaaacattcaatatggctggtttgatgttttcaaatattattattcgagatgaaaagcttagaaataaatttcaggaaaaagataaaaatgttggatttgtaaatccgctttcagttgaggctcataaagcggcctatgaaaagtgcggaaaatggttggaagagttgaaagattatcttgatgataattttcagtttttgaaagattatcttcaggagaaccttccagaagctgtatatcagattccggaggcaacctatcttgcttgggtagatatgaaagtttgtcttccagatatcgaaaacttaccagatttttttgcaaatcgagctggagtattactggaaggcggagatgatttatttgtaggaaatgccaatggatttatccgtctgaatatggcaatgccaagagaaacaattaagaagggacttgatcgtatggttcaggcaatacgagaataccaaaatgaaaaataggaaaagtacaaagaaaagtttggaggatacagcatgaaactgatggatgaagtaatgttacaggaaaaaaggatgattgctgacagaagatatttgcatgaaaacccagaacttagtaatcaggaatatcatacaacagaatttatcaggaaacggctacaggagtttggtgtagaaatagaaaatcttaatctgaagacgggagtcagtgctctgattagaggaaaagggaatgggaagacaatctgcattcgccacgatattgatgctttgccgattcaagagcaaacaggattggatttcagttccaaaaatgaaggagttagtcatagctgcggtcacgatattcatatcgttacggcattatatagtgctaagattctccaacaacacaaagatgaactaaatggaaacgtgagaattgtttttcagcctgcagaagaaaatgtgacaggtgcgaaagcagtgattgcggcgggattgatgcaaaaagaaccattaaatgatattgtagtaggtttacatacgcatccacagacgccggtcggaaaaatttgcctgaaaaaaggaccaatggaagctggaaacgattattttaaaattacagtgaaaggaaaatgtggtcacgcggcatatcctcataactgcgttgatcctattgtggtaagtgcttatttgattacaagccttcagacaattgtttcaagagaaaacatggccgtacatccgacagtagttacaatagcaagtattcatgctagaaaaacctacaattcaattccgggagaagttgtaatgctcggcagtatgagaagtttatatcaggactcgagagaacacaatctggaggctttgagacggattacaaaatcggtctgtgagtctatgagagcggaggggactgtggagattgcagatgcttctcttccaccaattacaaatgattcacaggttgtaaatgatttaattcaagtagcagatgaaatgcttggaaagggacatgtattggaatttgagcagccaagtatgggatctgacgatttttcagtctttttaaattatagcaagggagctcagtttttccttggtacagcaaatgaaagtgtaaacagcaaattgggcttacataatggtaagaatatatttgatgagaaaagtctggtgacgggagttgcagtactgaccggatatgtaatgaagtcgctaagagggggaaaattatgaatgaaaagaaatggaatttaaaaacaattgtgttatatggaattaattgtgtggtaggaagtggaatattcctcctgcctggttcagcatatcagttaatgggaccatcaagcttgctggcatatctttttgtcctgattttggtaatgtcagtagcactgtgttttgcagaatgtggcagcatgtttgaacagtcaggaggcccgtatctgtatgcaagagaagcttttggtgatttttttggatacgaagtcggagtcatgaaatggattgttagcattatcgcatgggcaacaatggcagttggattcacaacagcactttcagcgatttttccggcggcagcggatccgttcgtaaataaggcaattgcaattggaattattaccgtattaagtataatcaatttattcggtgtgaatattatggcttatttaaacaatatttcaacaattgctaaaatgataccgatggttatatttgtgataggaggtctgtttttcctgaaaggaagtaattttactccgtttttgaaagatggaatgaatatgaattctatttctgctgcagtgattacagtattctatgcatttactggatttgaaaatgtaggtgtggctgcaggagatatggaaaatccaaagaaaaatgtgccaaaagcactgattatttccatgtcaattgtttctgttatttattttctgatacaatttaattgtattggaaccctgggaacaaatctttcaggaacatcaacaccagttgcagatgcaatggggacttttcttggaaacaagggagcgttacttgttacacttggaacactggtttctattgcaggattgaatatctgtggttcttttaacacaccacgttgtgcccaggcacttgcagatggaggtcttcttccgaagacattgagtaaatgtaatagaagaaaagttccttatgtggcagtatttatcacgggaatgttagctgtattacttacattaactggaagttttacagagcttgctgcaattagcgtgattagtagatttagccagtacattcctacttgtcttgctgttattgcactgcgaaagaaaagtgatggaaagaaagatggatatagggttccattaggatatacatttccagtgattgcgattctcgcaagtatttggctgatatttcatacagaggtgtataaacttattgcaggacttggagcaatggttgttgttgctcctatctatttcattatgaaaaaaagaaaaagtgctgaattgagctaagatagatatatctcctttaggtggattggttgatagtttttcgcaactctattttaccataaaccttgaggagatattttatttttaagattagataatatagaacaaagaatgtgcctcggcacactcttgcgcctgcggcggtcaattgcgacatctaccttgtacgccgcagtgcgcatcctaagcggagcattttttatatattaggaaaagattttcctaatatataaaaaaacaccgtccccacagctcctatgtctgtaaaaacagtgattgctagtgctcgatcaggggttcgaaccccgtatttacactcagaaacgcctagaaatggaggttttgcacagcgtcttggcgagtgtaacacagggtgtaacacctgatatgaaatcattaaattattacaaacatacttagccctatattactagaaatattttctcattggaattgctgaacgataaatctgtacattatgaattttattctgccataataattctctgattcccaattcaaatacactttctttttctttgacataaggattcaacgtaattccctttaagctatcccttttaaatttataatccacataaggtattaaaatatttccacgtttaaattggcctttttttagaattccatcttgtccagtagtttcttccaataataattcttctggtattttcaatataaccctatactcattttcacatgaaaaagaatcatttttgaaaaaacatctcatattattaatcgcctctttgaatgcccattgaatatgactctggcatttttcaatggtatcttcttgtaaatatacttcatataaattatctagaagagctttaatacacttttgtttatccattctttgatataaaaccagtcctcggcaaatagtaatatcattttccaaatgactactattatttacttccgagatatcgctgccctcaaacaaattccatgcaaaatcaaaaataagattaacaccacttccagatgttgcataataattccacatagtaagtgaatctttgttcgttgaaaaagaacacgtatatgttctatagactttttccgcataattttgcgtatttttttcttttcctatatatggttgtctataagattctaattcttttataagactgtcattaagaatcatatctataaactctgatgcgtattcttcatgctgtgcaacatatttcactaagggaataatttcaataaattctgtagaatcatttaaaaaacgcacgtcactaaatcgcaaactttcgttttctaaaatatttttgagtacatctacagaacaataatgacaaattcttgatgctttatttccaatgccatctactccatatatttgatcaattgttaaatctttataaggaacattcaaaaaatgagattgcgaaattgctatacattttgctaacatatcactttgcatatattattctcctcgattttatttcattaagtttcatttttcatattttagtaacccattcactttatttgcttttgctcgcctcttttagccgtctatcatctatccttttgggaatactattccccgcaaatattacaaataatgaattcctcctctttgcataattctttcttttacttcttctgcagaatcaaatccttctgctgccaaactttctgttgcctcatttaacgcatcttggacgccttctctcatttcgtcaattctctgcattgcaaactttttacccaacccgatagctaccgcttcatcctcaaaagattcttttgtaatttttcgtatatcataaatcccaccaattcctaaagacatattttctgtgctactctcataaatcattgtgctgaccatgtcatatgccggcgcaagacgaatgtcattcaaattctctgcataaagcaacgatacattttttatatgattatctgtatttccaattagataattaaagatacaaatatcccacaattttttctgatcttctaatggatttgaagagtattttttaatcacttcaaacattttctttagataatgatcaccttttttttcatatttcattgaagatgaaattcccatcgcctgcgcaaaatcttcctgatgcaacctaaatgggatctgaagatcttttaacatataattttcttttttaaattttctatcataccgttctgttgcaaataaaatattttctccctgcatcttctggctatttataataaaactatttggtacttttatccctaaattacttgccgtcaaaagacacagttgctcatttacaacaattttttccaaacgtacatgactttgtttcacaatatgtgtactcggcatagatcctaaaggaagataccattgagaatcagccttatcataatacaaacccacttttcccgatgctccagttaaagacaaatgcgattttgtcacaatctctgcactttccgacgctccttcttttgccagtatctcaacctcacgttcagttagttttcgataatccggtactattttctcactattttcatcaagaatctgaattgcaccaagacactcattgccaagtccagccaaaattgaaagataatcattcacatctttttgcatccaatctgcaacacattttcttgtgaacccttccggcaaaagaccttcaaaaaaatatcttgtccttttttcatcaaaggctttctcttctaaaggtaagctaatagaaattggttttccattcttttctatgtaactatcatcataagaaaaacaagcatctactgaagaatccccaacaatcttacctacatattcctgttttccgtttttctcaatataaacagataatattctactcatctgatcccctcttttctatttttatatccattcctaacagttgaattaactgtaaagcttttccaatctctgccgtcttcttccctctttctaagtcagaaataaaactgatactgaatccagtaaattctgccaaatcactctgcgtataacctaattcttttcttcttgcccttatagttgctcctaatgttatcgaatctataattttcatattgtctccataaaattagccgttcggctttattttgttttcaatttgattttttaagccgttcggctttattcctgtgatttaaatataaaataagccgttcggctttgtcaacaataaagtaatcttcccacgtacgaaaaagcacctacaaggtgctttttaatgttatgtcaaagtccttcctttcggtaagcgtttaggaagttgttcgcaaattttaatatcttgaaatatgtacatcacacccctcccaagctaactggctcatgaatttctatcccctcttccaacgcagcttcaagccacgccttttttgcatcctgtgcattttctactgcactttctattgtttcgccacaagtaatacagcctggcaaatctggataaaaaactacaaatccgccctcttctttgtcttctacaatttccatacggtaggacattgccatgtaatcattcaaggttttcattcatcttctcctcgcgttactaaaacatatctccaaacatttctccctctatatcacttatctgttcacttgggataactgtcttatcttccataacaactgtatgttcatatttatcaatccttttcacataaccagcgtgagaaatatatgctcccccagcttttttattatccggtacaaaatatgtgattctgaccacttgttgtgtaccaatggtttcagcaatcagttttaacttctcattcaattctgctatgacttcatcactcagcatcaatttttcatctgttcgtcttgcagtttccttaatggctgcttcgtgtccggtaagtgctgcaaaaggtgaaaactgtgctgccctgtcagaaaggggcatacgaggatgttttgttgaagttggattcggcagatttataatatcatcatagctgtgattgtcttggttctccataatcttcctccatttacagtggcataggtgtccgtattttctttctacgccttgtgtccacctatctgttcgttacggtcttttgctgttgctccctcttgaaggttcattcccttcaggatagcattcttcccgaatttcttttttattgtaagcattgtctgttgcatacgtttttcacgttctaaaactgcgtcttcttcagcttgctcctgttcttttgccttataatccgtaaaaaggtcaagctgctcatacttttcttctttctttgctatgctctcgtctactagccgattcgctgtaatattaattcttctgataagcagatttttatccacaattctgtcatacagctccatcacagcatctgtaatcagcattgttgacgatgtctgccttttcagattcgttgttccgtgagcatgttttggaacttttcttccatatctgtcaatcgtaacatcaccattatatttcccgctcctatttgggtctgtcagattttctatatcataacctacagtcaatacaacctgatcggtaacaagtcccttatcaactagatccaaaaccataagatcggtcatctcttttacagccagcttcgccttatcaaaatcatacgggcagtgaagtacttgtccggagcttacactgttagtttccggcttgtacgccttgacatgctccaaagtacaaggctcgtatccccaggcatgatctatcaacaattctgcattgattccaaacagcttataaagaagttcttcgttatacagttcatttgattttccaatagaacaccttgcaatatctcccatcgtaaaaagtccgtgttcttccagcttctttgcataacctttgcctactctccaaaagtctgtaatcggtctgtgactccataattgtctgcggtatgacatttcatccagttcggcaatccgcacaccattctcatctggctcaacatgctttgccacaatatccatcgcaatcttacacaaatacatattcgtgccgattccggctgttgctgtaattcctgttgttttcaaaacatcctgtatcatcgtcatggcaagttcccttgcagtcatctgataggtgttcagataatctgttgcatctatgaatacttcatcaatcgagtaagggaaaatatcttccggagcaatatatttcagatatacactgtaaatttttgtgctatactccaggtaatatgccatacgaggtggtgcaacgatataatcaatctctaacgccggattcgtatttaattctgtactgtcatcggatgaaccagtaaatgatcgattcggtgctttccacctgcggctgttattaacttcttttaccttttgcacgacttcaaacaaacgcggtctgccgggtatcccatagctttttaatgacggagataccgcaagacatattgttttctccgtcctgcttttatcagccaccacaagatttgttgttaaaggatcacgatttcgctctttacattccacagaagcatagaatgatttgaggtcgattgcgatataggtcttttgctttgccatcattctacgccccctttttaaattcctttaagtaaattatgctatagtataatcaatttaacagaaaaaagtcaaccgtatataatatttctttaacctgaattattcatggaacaatatctgaactaataactgtgccatgaataattcaggtcaattactctttttatctttttcagaacttttttggactatttatttccttgcgaccagttcgcgaccgatttcgcggcaagtcacttcgtctttacaattcatagtgatttttggttcaatggtcagaaaccgcatatttacgcacaaaaaaatcaccgtccccacagctcctatgtctgtaaaaacagtgattgctagtgcgcgatcaggggttcgaaccctggacaccctgattaagagtcaggtgctctaccaactgagctaatcgcgcattcttttgtttttgtgtctcgtgttcctcaacacaaatagtattatatatcagttgttgccagaatgcaaccccttttttcaaattttttcatttttttcaaaattattaatttcatatacaattcagacgatatcagcaacgtttcttctttcccgtgtctttgttgcaatatcccctatttaaaattcgatacacctcctcgaaggatctgcaaatgcagacaatccttcgattcagtctctgatgacaataacacaactcacggaccccagctttccaacatttcccccgtctcatcctgttctcctatgaattctgctctttctatataatatatgatgcttattttctctgtgcgatcagcttattgattggatttcccttctctgaaaatttctgctcatattctgtcataatattccccttattcatctcttcctgatgatgtaggtcgtaagtataagcaagcagttcccatccagcttctttcacctgctccagagaaaagttgaaaagttcagtattatctgtcttaaattctactcttccattttccacaagaaccttctcatatcttgcaaggaattctgttgatgttaatctacgtttcgcatgtctagcctttggccacggatctgagaagttcaagaagatcttatccacctctgccggtgcaaacactgcttcaatctctcttgcatccatgcagataaaacggatattctcaagattttcaaattcctctgtatcatatttttcaagtgcacgaagcagtacgctggaataacgttcaattccaataaaattgatctccgggtgagccttagccatattcaaaataaactggccctttcccattccgatttcaatctgaattggtttctcatttccaaagacctgagcccactgtcctctctgctcctctggtttcttgatcacagcacgatgtgcatcgatcacgccatctgctcttggtatatttcttaatctcatctgctatttttctcctgttcttcaccacagcattactgcgtactttctatatataaggtaaaaccttctttgatatctgcggattatttcaggtcttatcataacatgatttttctcatctcacaactaattactgtccacacaagaaagccattttgaagaatactaatgacattctcagactcacagtctctatctccaatacctttggatatttaacataaattatcttttcagattgcttgtaattttctccaaaaggtgtattataaaagatattatgaatttctaacaaaaaggaggctggttatggactctattataaacaaattgacagagattgaatccgccgcatctgcaatcgtgcaacatgcagaagccgaaaagtccgcattagatgaaaaatttgacaaaaagcggatggatttcgacaaagagcttgaagccgatacgcagcggcagattcaagaaattcgtgacaaactggatgcggagacctcacggatcttatccgggcaaagtcaggagagtcaggatgaacttaatgccctgcagaaggaatacgatgaaaagcattctgattatgctcatgagattctccgacggatcactgaggtgtagcctatgggaaatctactggaatacagtggtattgtaacgaaaacccgggcaatggaagccaaactccttaccccggcacagtttgaggaaattgcttctctacataatgttcccgaggtagttgaatatctgaagaaagaaactgcttacgcagatattttagaagaactggcccccgaacagcttcacagaggaagtattgagaagattctgactcgttcactttaccgcgactacgcaaagctttaccgcttttgtggacagaaacagcgcaagcttatgaagcttcgcctgaaatcttatgaagttgagctgatcaattattgtttgaggattgtgatcaaccattatcagaaaccttttgatcttgattacaagcgtcctttcttcgaccggtattcacagatatcgatcgagaaactgatcacctcacgcaccaccgatgaactgatcgagacattaaaggatacagaatattatgaacctttaaagaaattaaaggattctccttctgtcaccctatatgactacgatctggcattgaatctttattattttactaccctttggaaagcacggaaaaaggtgtttaaaaaggaagataaggaattatatcagcgggactgcggcactcagattgatctgctcaatatgcagtggatctacagagccaagaaatattttaatatgaaacctgctgacatttatcagctgattcttccaatccactatcgtctgtctaccgacctgatcaaaggaatggtcgaggcaacgacattggaagaactgcagacactctgcaatcagactccttatgcccgccgctatgaattcactgagcagcttaccatggagcagatgtattcagaatgtctccatcatctgtacaccattgacagaagacggaatccttactccatcgccgctgtcaacacttacctcttcttaaaagaagaagaaatcaaaaagctgactaccgctctggaatgcatccgttacggactgacaccgggcgagacgttagcgtacgttggaggtagaacccaatgattgttaaaatgaaatttatcaacatttccggtccgcgggatgatatcgaccgtgtcacagacttgtatctctcacgttatgagatacagctggagtccgcactgtccgagcttaagacagtcgataatcttcgcccgttcgtagagcttaatccgtaccgggatgtacttgcccaggcaacccagttcgtcggctatcttccgaatgtagatgatgttacaccggatgaatctttaggtctcgacgacatgtttgaggttgttcgcaaagcctgtgaagattacgaaggtctgcaggcaaagaaagagaaaaagaaagctaagattgaagagctccgtgccaaacagcaactgctctccccattccgtccgctcgactgcgacctgcacaaggtccttggatatcgatatattacgtatcgtttcggacggatcgcgctggaatcttatcacaagatgaataaatatctgatggatgatttgagtgcaatcttcgttgaaggtgaacgcgatgaaagcttcgtatacggcgcttacttcgtttctccgggagaagcacaaaaggtagatgctgttttccgttctcttcattttgaacgcatcgagctgaaagatgaatttgaaggaactccgtctttcgcttaccagtcactggaacgcgacattgcaaggatcaatctggagatccaggatctagataaagaagccggagagatgctttctgacagagctccacagctcattgcagcgaaaaaccgtctggaggaactctccaagaactttgacatccgtaagatggctgcccggatgaaagacagccaggatgattcttatatcctctgcggatggatggcagaagatgatgtagagaagtttttggaagagatcaaagatgatgataaagtctttgtcgttgtcgaagacgaccatgatgcatacttcggagaaccgccgacaaagctggaaaatccgaagctattcaaaccatttgagatgtacattcagatgtatggtcttccggctcacaatgagatggatccaaccattttcgtagcgatcacatactcctttattttcggagttatgttcggagatgtcggacaggggcttttgcttttaatcggtggagccttgatctatcactttaagaaagctccacttgccggaattatcgcaactgccggtgtattttccacaatcttcggatttatgttcggaagtattttcggatttgaagacatcattgaaccattgtggatacgaccaatcgaccatatgactacactgccgttcctcggcaaactgaacacagtgtttatcgttgctgtcgcatttggtatgttcctgatcatcgtagcgatgatcctacatattatcaatgccgcaagaagcaaagatatcgaaagtacctggtttgatccaaacggtgtggcaggacttattttctacattgccgttgtagtaaccatcgttctctttatgacaggcaatccgcttccaggtggtattgtcatgggtatcatgtttggtgtcccgctgcttctcattttcctgaaagagcctctgacccgcatgattgagaaacgtgccgacaagatggaaacaggccctggaatgtacatcgtacaaggctttttcgagatgtttgagacattgctcagttatttctcaaacactatttcctttatccgtatcggtgcatttgctgtcagccatgccgctatcatggaagtagtacttcagctggccggcgctgaaagcggaaatccgaactggttcggagtaatcttcggcaacctgttcgtatgcggattcgaaggactgatcgtaggtattcaggtacttcgtctggaatattatgagatgttcagccgtttctacaaaggaagcggacgtgcattcgatccatatactaaaaagaaaacaaagtaactgttggatcataaatttatgacagctataaaatgtatagaaatcaggaggattccactatgagtttagtaacaaaaatcatttttatcgcagcacttgttttaagtatcatcatcccattcggatattatctgatcggtgaaaagaacaaaaaacgctataaacgtacaatcggtgtcaacgcatttttcttcttcggcgcatttgccattgcatctatcatgatgcttgcaggtccggcaaatgtacaggctgctgaagctgccgcatcttccggtgctacaatcgcaacaggaatgggatatcttgcagccgcacttgttacaggtctttcctgtatcggcggtggtatcgctgttgcaagtgcagccagcgcagcacttggagcgatcagcgaggattccagcgttcttggtaaatccttgatcttcgtaggacttgccgaaggtgtttgtctgtacggactgatcatctctttcatgatcttaggaaatctctaatttctgattttcaacagaaaggagccgcctatgaaaatgtatctgatcagtgacaatgtcgacacttacaccggaatgcgtcttgccggtgtagacggagttgtcgtccacgaacgggatgagctgaaacaggctttggaaaaagtgctttccgatccgactgtcggcattgttcttctgactgagaagttcggtcaggaatttcctgacattatcgacactttccgactggagcgaaagatgccgttattaattgaaattcctgaccgccacggaaccggtcgtcagaaagactttatcacctcatatatcactgaggcgataggactgaaattataaacgcaattatattacgaactaaaggagggattcctcttgactctagaagaaaaaatcgcacacctgcaaaccacatccatggagcaggcccgcttagagggaaatgttatcattgacacccatcaggctgccttggagaaggttttcgaagatcataaggcagaagccacaagacagtcagaaactcgcatcaaggcggaagctgccaatgcgaagctctcactgaatcaggcgctcgccaagtcccagctggagatcaaacgtcgtcaaagcaaggttcagcaagaattgaaagacaagatcttcgaggaagcagacgcattaatcgatgaatttatgaagacggaagcttatgatgattttcttatcaaatgcatccgcaaagcggtggcttttgccggaaatgatgagcttacgatctatattaacccaactgatgaaaaaaaacgttctgatctggaaggtgctacaagagttcatctgacgatcagcgccgaagatttccggggcggtgtccgtgctgtcatccgttcccgcaacattttgatcgataattccttcagcacacagctgaaagaacagtatgacaaatttgtatttttaggaggtgacggcattgcttaagacagcgaaaatttacggcatcaatggtcccgtcatttatctgaaaggcaacacaggattccgtatgtccgagatggtctatgtcggagaacagaagttagtcggagaagtcattgcactggataaagatatgacaaccgttcaggtttatgaggaaacaacggggcttcgcccgggcgaagaagttattgccagcggaagccctgtatccgtaacacttgcacccggtatcctgaacaacatttttgatggtatcgaacgtccactggaagatatcgcagaattctccggcggcgcatttatcacacgcggtgtcagtgtcgattctctggaccgtacaaagaaatggaaaacacacatcactgtaaagcagggagattatctccatgcaggtgatattatcgcagaagttcctgaaacacatgcgatcactcataaatgtatggttccgcctgaagtagagggaactgttcttgtgactgttgcagacggtgaatacacaattgacgaacctctggttcgtctggaacttcctaacggacaggaaaaagaactgacaatgactcagcattggccgattcgtactccaagaccgacacatcatcgttttccggcatccgtcccgcttgttaccggacaacgtatcatcgataccatgttcccgattgcaaagggcggtaccgctgccatcccaggcggattcggaaccggaaagaccatgacacagcatcagatcgccaaatgggccgatgcagatatcatcatctatatcggatgcggtgagcgtggaaatgagatgacacaggttttggaagagttcagtgaactgaccgatcctcgtaccggcaaacctctgatggaccgtactacactgattgccaatacttccaacatgcctgttgctgcccgtgaagccagcatttacaccggactcactctggcagaatattaccgtgacatgggctacgatgtagcgatcatggccgactccacttcccgttgggctgaagctcttcgagaactttccggacgtctggaagagatgcctgcagaggaaggtttcccggcttatcttgcgtcccgtctgtctgcgttctacgaacgcgccggaatgatgcataacctgaacggaacaaacggttctgtcacgatcatcggtgctgtctccccacaaggtggtgacttctccgaaccggtcacacagaacaccaagcgtttcgtccgctgcttctggggattggataagagccttgcctatgcaagacatttcccggccatccactggcttacaagttacagtgagtatctgaacgacttaagtcactggtatcaggacaatgtatctccgaaattcgttgattaccgcaaccgtctgatggcacttttgaatcaggaaagcagtcttcttgagattgtaaaactgatcggaagcgacgtactcccggatgatcagaaacttgtccttgagattgcccgtgtgattcgtcttggtttcctgcagcaaaatgcattccacccggatgacacctgcgtttctatggaaaaacagttcttgatgatggatacgatcctgtacctttacaagcaggcacgtacccttgtcacaatgggacatccgatgtccgtattaaaatctgagaatattttcgatcgtgtcattgcgatcaaatatgatgttccaaataaccgcccggaaatgtttgcacagtatcacagagatattgacgctttctatcagcacgtacttgagaaaaatgcataaggagggaccactatcatgtcaattgaatatcttggcttaagcagtatcaacggccctctgatcgtgttagagggcgtacaggacgccttttacgatgagatcgtagaatttgtcgtagacggcacagaacgcaaaataggacgtattgtagagatttacgaagacaaggcagtaatccaggtcttcgaaggttctgaaaatatgtccctgaaaaatacacatacaaaactgaccggacacccgatggagattgcactctccccggatatccttggccgtaccttcaacggtatcggacagccgatcgatgacctcgggccgcttgtctccactttaaaaagagatgtgaacggactcccgctcaacccggtccgcagagaatacccaagaaactatatccgcaccggaatttccgcgatcgacggactgacaactctgattcgtggacagaagcttccgattttctccggaaatggacttccgcacgatcagcttgctgcacagattgtaaaacaggcttctcttggaagcgattctgatgaaaaatttgcaatcgtattcgctgctatgggtgtcaaacatgacgttgctgatttcttccgtaacacatttgaagaaagcggtgttgccgatcatgtagcaatgtttttgaatctggcaaatgacccggttgtagaacgtctgatcacaccaaaggttgcactgacagctgcggagtatctggcatttgaacaaaatatgcatatcctcgttatccttaccgatatgacttctttcgcagaagccatgcgtgaggtctcttcctcaaaaggagaaattcctagccgtaaaggattcccgggatatctgtatagtgaactggcaaccatctacgaacgtgccggtattgtacaaggcgtaaacggatctgtaacacagcttccgatcttgactatgccaaacgacgatatcacgcatccgattcctgacctaacgggatatatcaccgagggacaaattgtacttgaccgcccgctccatggacagtcaatctatcctccgatcaatatcctgccatccctttcccgtctgatgaaggacggtatcggagaaggttttacacgtgaagatcatcaagatcttgccaatcagttattctccgcttatgcaaaagttggagatgcaagaaatctggcttctgttatcggtgaagatgaactttcaccactggataagaaatatctggaattcggaatcgactttgaacagcactacatcggacagggtgttaatgagaaccgtacgatggaagagactttggatctgggatggaaacttttaggaaaactccctagagaagaactcgaccgtgttgatacgaagattcttgataaatactataaacctgctgtagaagactagggaaaggagggagcttcatggatccacgtacatttccaacaaagggtaatctgatgctggccaagaactctcttgcacttgcccggcagggttatgatctgatggataagaagcgtaacatcctgattcgtgaactgatggatctgattgaagaagcacgcaccatacaggaagagattgattcaacatttacttatgcgtatcaatgtctgcagcgtgctaatatcgaaaacggtatcagcatggtagaacagctcgcctacactgtaccgattgaaaattctatcacgatccagacacgaagtatcatgggaaccgagattcctcatgtgaaatatgtaccggacgccggtcagccgacctatgccttcagtaccacaaaggaatcgatcgatattgcccgtgaggccttccgcaaggtaaaagaccttacgatcaagctctccatggttgaaaacgccgcttaccgtctcgcaagtaatatcaagaagacgcagaaacgagcaaatgctctccagaacattacaattccaatgtattcaaatctggtctattcgatcaccaatgcactggaagaaaaagagcgtgaagagttcacgcgtctgaaagtgatcaagagaatgaaagagaaaaaagcctccggttaacgggggcttttcctttccacaggatactattctcagtatacctgaattctcatattgcaacaacgatctgatattctttttcaaaagtctctccgctctctaccttattaattccaggcttctcagagatttctttatcaaatccaatattatcgcatcttcccatccatggttccaggcagacaaacggtgcgtcttttacagaccagattccatagcttgggaatccttctgacttaactcccacatacggagttccgtctttatgacagatccatgcttcttcaatctgcgtattatcaaagatcaacgcatcattttcaaaaagttcttctgtcaacggatatgtctcttcatttagtttcatctcatgcagtttctccggatcaggagccatttctttcatattgatcagacaatacttcaattcatcttttccagggaacttcagaatataatctgtctttccttcctcgttctttgcaaagcggaaggccggatgcgctccgattgtgaaataaattgtctcatcagacgggttctttacttcccattttacatggagtacatttttttccagtgtataagtaatgaaaagttcaaaatcaaatggataaacttccttcatctcttctgttgatgtcagaagaaagattgatgtttctttgcctgcatgaatacatttgaactcactgtctcttgcaaatccatgctgtgatgtcggatagtgtgtgccgttgatcttcactgtgttcttataggtttttcccacatttggaaatagcaccggtgaatgacgtttccaaaattggggttctgcatcccagagaagatctgtacctgttttcttgttatacagttttgtcagctccgcaccatgctcagcaatctctacgctaagcacatcattctccattttaatcatgctttttgttcctcctttattccccttaattattatcagactgctctacctgtacgcaattgtctaccagataatccagtactttatcacgaaggattgcatctttcagaacatcttctcccacctgctctttgtaggtatccagatctgctccggctttgtccgcatactcctgcattccttctttatattccttatcagacggttccagtttctctttcttggcgatcagttttacagcttcttcaagctgaacagcctgctttgctgagtcttcaatttttttgttaaattgatcttctgtcatcttcagataagttgtaataaaatcactcagctctactccgtacatctgtgcgatctgtgtatagtaatcatttgcctgtttcacctgctcatctactgcaccgtcaggatatttatttacctctatctgatccagtaaagcagtctgtacttcttgtttcaactgtgaattacctgaatcgtcctgctgctcctgaagagaattttttacctcttccttgtattcatcaaccgtcttgctgctttcactattatttgcaacccactcgtctgtaagctccggtgttactttttgataaatcttattcaatacaatgtggaaatttgccggttttcctgcaagatcagaactctgataattctcaggaaactgtacagtgatatcaaactcttcgccggtattatgtcccacaatctggtcttcaaatccctgataatcgcctgaagctccgataaacgatcctgatccaagttccagatcatatcctgtagctgtgccaccgtcaaatgcaactccatccagagttcctgtatagtcaatatttacccagtctccgctctgtgccgcgcggtctgttacatcctgttctggcgcagcagcttccagtctggactgtatctcctgctctacagaatcatcggacacctcgtttttggcaacctctgttacttcaagtcctttatatttgttcactgtcacataatcattagacaacttaccacttccgcatcctgctaaagatgctgtcatcagaaccgctgtaagaaccgcaatcactctttttttcattttcctgtttctcctcttttataatttcttttttatttttttgtcttatccactataaaagtggtgacagtaatctggaaaactgttccttgaaccggatcagtaaattcctctcctcatatatctttcgtgtcacttgcgtactctttgtcatatcattctcaaaagctctttccaacctctgcactgtacgctcactatagattgttgcattcacttcaaaattcaagccaaaacttcggatgtccatattcgctgtacctacacaggcaaccatgccatctattgataatgtctttgcgtgaaggaatccattattatagacataacattttgcgcctgctgcaaccatctccccaatataagaatacgttgcccagtaaacgaatggatgatctggtttgcatgggatcataattctgacatctaccccggatctgcttgcaatcttcaacgcatccagaatggacgcatccggtatgaaatacggtgtctgtatataaacatgatttcttgcactgtggatcagatgaagataattgtcatggattgtcttcgtctgtgaatccggtccacttgagataatctgtaccggatcaaatccatgcctgtcatactgcggaatctcaaacaaatgatcttccaaaaacaagttctcatgagctgcataattccaatccaggacaaacctcactgcaagagatgtgaccgctgcaccttcaatacacaaatgtgtatctctccaataaccaaacttttcgtcttttccaatatattccctgcctacattgaaaccaccaacaaagccaacctttccatcaatcacgacaatctttctgtgatttcgataattcacacgcatctgaagctgtcccagaatcgccgggaagaattctgcgacccgaattccttcgcatttcagcctgtcccaatctcttttgtgcatggtacgacatcccatactgtcaaacaaaactctgacttctacaccttcatgtgctttctcgatcaataccttctctatatcctgccacacttcatcattcctgataatataatactgtacatggatatatttcttcgcacgtttcatttcctcgatcagtgcatgaaacttctctttaccatctgtataaatacggatatcattattatctgtcagaactgcctgtccggcctccagattataaagcacaagatcccggaaccggttaagtgccggactcgtcatcttcagctgcctgtgataaatggtttcctcctgccttcgcacagcgtatttcagctcaccttcaatctcctttgccttaaacatcttattcttgtgataatcctgccctatgatcagatatagaataaatccgacaatcggaataaaataaagcaaaagcagccaggtccatactgcctgcggtgatcttctttcaaaaaatacaataatcagagataaaagaatattaatgataacgatattcttcataataaaatgaaaaaccatcaccactgtgttccatattgtctctgccattcaactctccctttctcttaatcaacgtgaaaatattattgctcactatactccatcacattcttcggacagcgcgttactgttcacacgatgtgcgaccagcaacgcatctcgccattttaaatcgcctttggcgatggggcgagatgcattcaagtcaaaacacgcatcctccgtgtcaatcagccgagtgattgacacgggagtgaacagcaacgccagcgctgctatctttctgcaaacaataataaaccaccataatacatagtatactcggtttacgtcttaaaagtaaccccaaattgtaaaattgtcccctgtctgcttgcactttgtaataaagaatgttacaatattaaatgcgaattaagcggaaaatagtatataggagggttttatcgtgagtacacctatgataatcatgctcatcgtcctcgtagttctcatcggggtttgcgtagcactctatttcttcggaaagaaagcgcagaagaagcaggctgaacagcagcagcagatggacgcagttgcgcagaccgtcagcatgctcattattgataaaaagaagatgaagctaaaagatgcaggactcccggccgttgttcttgagaatacaccaaagtatttaagacgttctaaagtaccggttgtaaaagcaaaggttggaccaaaggttatgactctgatgtgtgatgtaaaggttttcgaagttcttccggtgaagaaagaagcgaaagtcgttgtaagtggtatctatatcacaggcattaagagtgtccgcggtggtcttgatattccagagaaaaagaagaaaaaaagatttttctcaaagaaagaaaaataaaaacaccattaaaataagttcagtcaaacaattcgactgaacttatttttttaattctttttcttttgttcttttctcactgcttcatattttttcagctcatccaacgcctggccacccatcagatacaggatcactgtattgaataccgtcatcagcccgatcccgacatcgcccagatcccatacaaatgtgtacgctgcgattcctccgatgaataacatcacaagtgcgagcactttatatgctgtctgggatgcccagttgtctccaaacagataagctacattacttcttgcataaaacagaattccaagaaatgtagaaaaactgaacaggaacagcatcactgcgataaaaatcacccctgcttctccaagatgatatctcatcgctgtctgaagcagttccattcctgcaagtccctcaatctgatcctgtggaacaagcaacatgatcatcgctgtacagctgcagattacaattgtgtcgataaatacgcccaatgcctgaacaagtcctgcctttaccgggagatcacactctgccgcagccgctgcacatggagcagatcctgaaccagcttcatttgagaacaatcctctcttcactccattcatcaaaacagctccaaaaccacctgctgccacctgacggactccaaatgcttcctcaaaaatacgtgagaacacacccggtatgctggacagattcgtaaggatcaaaaatactgtgatcaggaaataacacactgccataatcggaacaacaacatccagaacctttactgttgcattctttcgaagcacgatcactgctgccagaaccaccaaaatcacagttgtataaatcggtgggatagaaaatgcattttcaaacgaagacgtcactgaattactgatcacctggctaataccacaccaacagattaatcctgaaattgcaaacaataccgcgatcactgaatatctctttttctttccttgatgttcttccatgtagtgatggatataatatgccggacctccgcgatatcctccatacaacggatctttttctttatgaagctgtgcaagtgttgcctcaacaaatgctgtggaagaaccgatcagtgccgtgatccacatccagaacactgctccggctccaccggctgaaatagctgcaacaacacctaccagattccccattcccacacgggttgctgttgatacaatcagtgtctgaaaattagacaacccatcctctttcccttttttactattcaacgatcttaccatctccgggaaaagacggattggaagaaatcttgtacggattgtgaaataaattcctgttggaatcaacagaataatcagaagtgatattcccacacttccgccgcctggaagcggtatctgaaacagatcgccccataaaaacgaatatactttctcgatcagtgttattaccatcatcttatcctctcattcttatctttttcatttttccgcctgcttatccaaaaatgccccggcgttcttgtatcttaactaagcactgaaaactttccactgtccttggaaacaatattcatccgtatcttacagtctgccatcggttcatgatttacgtccagttcataatcaatctggaccgctatcttatcttcttcaaaatcaacctgaaggtgtctcgtattcactccgatcagcatctgtccataaggcgtcttataaaatgtctgattctttttatttttctcaaagatcatatgagagtttgaaagaccgcttttcacgatctctacacattcatctccgttaatcttaattctgttcttgatcactccggaagttccttctacaacttcctcgtagacaatataatgttttccgttcttcaaataatatgttgctggtgtcacaacttcgattgcttcgttctcatcatcttctacctccggagtgaccgccacaatctcctcatgcattccggaaatacttaccaatacatcttttgtcataaatgaattctccatagaaaagaatcaggaaaatttcgttccgtcagtctttccgcaaccaacgtacaagcacgaaataactttcctgattcaaaattactaattaatactcttcaatatttactacattcgttgtcggaacatcaaatggcatcactgtattcgcaaacttcctgaacttctcagccgcatcgctgacatagaaggaatactcactatgatgttctgtcgtctcatcattcgccatctcttcctcttccaacagacgtttcagatccatcgctgtctcatatgcaggattcacaatctgaatcttatcccccatatattctctgatcttagatctgagaagcggataatgcgtacatccaaggatcatcgcatcaatatctgtattgcgcatggattcgagataatactcaataatctctcttgtcacaatatgttctttgaatccctcttccactaacggtacgaaaagaggacaggctttctcaatcacttcaatcttaggattcattccctgaatcactttcgtatacattccactctgaaccgttgcttcagtacctaccacaccgacttttccattcgttgtagcttctaccgctgctctcgctcccggaatgactactccaatgatcggaaggtcaaactcatccttcactgcatccaatgcaagcgcactcgccgtattacatgcgatcacaattgctttcacctgtttcgtcctcaggaaacggataatctgttctgaaaaacgaatgatcgtgttttgtgatttactaccgtatggaacacgcgccgtatccccaaaataaacaatgttctcatacggcaattgtcttgatatctctctcgctacagtcagtcctccgactcctgaatcaaacaccccgatcggtgccatctttttattcttcatgtccgtcaaagttctccccttaatctatccttatcagttatttttatcttatcgcagatacacaattcagccatgtaaccttcttacaaaggctgcatggctgaatgttatatttcattaccagtcatctggtaaccattgctattctattataataactcaaagtgatatttgcaatgctatttcacatttttacagagcaagagtcttcgctacatcgtactgatatgccggaattgtcttcttcatagcaagtgcttcttcaatgtcaaaatcaataaactgtccgttcttgtatcctacaacacggtttgtctttccctggcaaagaaggtcgactgccatagctcccattgtagaagcatatactctgtccttacatgtcgggcttccaccacgctgcatgtgtccgaggattgttgctcttgtctcaattcctgtagcagcctcgattctctttgccatattgatagaatctccaacaccctctgcattgatgatgatgtagttcttcttaccacgcttcttgttcgcaagaatatcttcgatcagtgctttctcatcatagtccttttcctctggcatgagaattttctcggctccgttagcaataccacaccacagtgcaagatatcctgcatcacgtcccataacctcgatcacactgcatctctcatgagatgtagatgtatcacgaaccttatcgattgcttccattgctgtattaacagctgtatcaaatccgattgtgtaatctgtacatgcaatatcaaggtcgattgttcctggaataccaattgtatttactcccagatttgccagcttctgagctcctgcgaaagaaccgtctccaccgattactaccagtccgtcgattccgtacttcttacagatcgcagctgccttctgctgaccttcttctgtacgcattgtcttacaacgggctgtctggagaactgtaccaccacgctcaatgatatcagacacatcacgtgctgacatatcaatgatctcttccttcagaagtccatgataacctctgcggattccgcgaaccttaagtccttttgcaagtgcacgtcttactaccgcacggattgctgcgttcattcccggagcatctcctccacttgtcagaacaccgattgtacggatgctgtcttcgatttcatcaagatatttttctttgtcgactgttttattttctgccatgttttagtccaccctttctctgaaatgtctgattactgccaaaaccaatcattgtcaattttttatcaactccgccaatattctaccttatttagaatatgttttcaataggtttttccactacttttactctcttctcgccgaaatgattcatcaatctgcttaaaatctgttcatttataccgatattcctgtttttcggcagttttttcaccgcacgttccttcgcacagtagatcataacttcatcatctccgtctgaatctgccagatatccatagacaatctgttcctcatccagaaatgtcgccttatcaggaaactgaatccacaattcctttttcgtccgttcaaatgggataattttctcacagatcatcttactcggcttatcatcttcttccgaaactcttccgcgaacaaataccttactatctacttccagataatctctgttcttctcataatctcgcgggaacacaacaacctctactgttcccaaaagatcttctaccgtgataaatgccatcatctgattcgtctttgtgtgctttatggtcttctctgtgatcattccaccaataatttctttcgccccatcatgcacttttgtatgaccggtctcttcatccagctgaaagtccgccgttgtcgcagaaatggatttcttccacttctcctcatacgcctcaagcggatgtccgctgacatagattccaagcacttctttttcaaatgcgagaagtgtttctttggagtattctcccacatcaggcatcctgatctgaaattcttctttctgatcttcactcaccagatcaaacaatgtcatctgtccaaccatagagttctttttttcttgagttacatgatctacgatctgtacatagatactcatgaactgttttcttgttccgccaagtgtatccaatgcccccgccttgatcagattttctatcgtacgtttatttaatatgttctttgctgaaagacgggtaatgaaatcttccaggttctggaacaacccaagctcttctctgtcttccacgattgctttgatcaccggtcttccgatactcttgattgcagcaagtccataacggatatccccgccatctacagaaaagtttgcttcacctttattaatatccggcggcaggatcttaatattcatctgacgacatgcataaatatactcagataccttagacggattatcaatgactgatgtcataagcgctgccatatattctaccgggaaataatatttcagccatgcagtctgataagaaaccactgcatatgcagccgcatgagacttattgaacgcatattttgcaaaatcgatcatttcatcataaatcttatttgcagtctgttcatcaattccattctttatacatcctggtacgcctgtctcctcatcaccataaataaagatcttacgttctttctccatgactgccgcctttttctttgacatcgcacgacgcagaaggtcgcttcgtccaagtgagtatcctgcaagatctcgtacaatctgcataacctgctcctgatagacaatacatccataagtaggggcaaggatcggctccagttgtgggcaatcatatgtaatagaagaactgtcattctttcctcggatatactgcggaatgaaatccatcggaccaggacgatacagcgaaattccggcaataacatcttccaggttatgcggcttcagttccttcatgaaccctttcattccagcactctcaagctggaacacaccatctgtcttaccggttccgatataatccagcaccttttgatcattgtaatctatctgattgatattcagttccggctgctttcttcttgcaagcagaaccgcattctgtatcacagtcaatgtacgaaggcccaggaagtccattttcagaagtccaagttcttcaagtgtcgtcatgataaactgcgttgtgattgttccgtctgctgcccttgaaagcggtacatactcatctacaggcttctgacagatcacaacaccggcagcatgcatggagcagtgtcttggaagtccttccaaacgcttcgccatatcgatcagatttgtcaccgtctcatccgtatcatataactttttcagatccggattcattttcagagctttatcaattgtgattccaagctcctgcggaatcattttggaaatagaatccacataagcatatggcagatccattacacgtccaacatcacggatcacacctcgcgctgccagggtaccgaatgtaacaatctgagccacacagtcttttccatattttcttgtaacgtaatcaataacctcctgacgtctctcataacagaagtcaacgtcaatatcaggcatagacacacgttccggattcaggaaacgttcaaacagcagctgatagcggatcgggtcaatcgtagtgatctcaagacaataggacacgatacttcctgcggctgatccacgtcccggtcctactgaaattccatgatcttttgcgtatttaataaaatcccacacgatcaggaaatagtctacatagcccatctgatggattgtttccaattcataagacaaacgctctttcaattcttccgaaggatcaccgtaacgcttttccaatccttcatagcaaagcttctgcagatattcccaggaagtataaccatccggcacatcatatttcggaagttttgttacaccaaattcaatctcgacatgacatcgatccgcaatcttctgtgtattctccaacgcctgtttcgcataagggaacagacgtagcatctcttcttctgacttcacataatactgcccgccgtcataccgcatacgattctcatctgaaagcttctttccggtctgaatacaaagtagaatatcatgtggcttcgcatcttctgcatatgtataatgaatatcattcgtagcaaccagctcaattcctgtctcttcagacattttgaatagctgttgattgacaagtccctgctctggtattccatgatcctgcaactccaggaagaaattcccttcgccgaaaatttcctgatactctaaagctgtcttcttcgcctcttcatataatcccttcgtcaggaatcttgccacctcacctgctaggcaggcacttaaagcaatgatacctttatgatacttgcgcagaagttccttatccactcgcggtttatagtaataaccttccacaaatcccttcgaaacaatcttcgtcagattcgcatatccttcctcattttctgccagaagcacaagatgataatatctgtcatctcctcctgtgatctcgcgatcaaaacgagaattcggagccacatacacttcacatccaaggattggattgattccctgcttcttggcttcccgatagaaatcgatcacaccatacataacaccgtgatctgtaattgccgcactgttcatcccaagttctttgaccctggacacgtattcttttatcttattcgatccatccagcagactaaattctgtatggacatgcaaatgtgcaaaactcatagttcacctcaatgatcaaattttaactaagaaaagggaaggctctgacttgatacacaggtcagaatcccttcccttcattttacactctttatggaaattttaaaatgttaaatcttatttatttccaccatctatcataaactggatcagcttatctgtatcttctttctcgtaagcgataacttccagctccggaatctctccgttagagaaaatgttagccatagatacatactgggaaagtttagacttcaggttcagtctgtctccctcacctgttactaactctactcttcctttacaagaatctactaccttaaaaaatccttcaacatctgtaatattctgaactttcatcctaaatacccctttcttttaacaatttaattataactttacttcctaaattcatctgggaatgatattacctatcattttctcattcctaatgttattataacgcatttaaagcatattacaagtaggaagaatcactatttttctcattttcagcatataaaatctcacacttttttctatttgaaacaacacttcctacaagtcatagtcactttctctaacacgtaacggttcgtttgcagattgcttttacaaactataaataccgtcctctttgattacgattttcttctgtttcaagagtcttccaactgcacgtttgaacgcagctttactcattcccatctctgctttaatgcgctccggatctgctttatctgtgaatggaagtttacccccacaagtctcaatacattccaggatcaattctgcatctttgtccatctgctccggaatctttccacggacactcagatccagttttccatcctctttaactgctgccacacgtgcttcaatctcctgtcccggatacattcttccatacatctctctcttcggaatcaatgcagaatacagattatctactgccacgaaagctcccagatcacgattcacctcataaactgttccggttacaatatcatcctttttataaggagagtctgtctgcagaagatgatagatcttcattgtcgcacaaagtctctcgctcttatctacataaagacttaccagacagcggtcgcccttctctaccttctctgtctgttccttaaatggaaggaacaggtccttctcaagtccccagtcaagaaaagcacccattctgcccacatctgctactgtcaggacagccagctgtccaagagtgatctttggctcattcgttgttgcgatcatacgatcggaagaatctttatagaggaatacctcgatcggatctcccagttcgattccgtccggaacctgtttctttggaagaagaacacgctcctcgtcacttccaagatatactccaaaatctaccagctttactaccgtaagtacctgttttactcctaatctcatcttttctccattctgccgctggcttacgcggcccattttttaatatgttttctataccttaaggtattttctatgctgttgtcaatcgaatctcatcaatttctttgattctttatttgatatttttttaacatattctttctatgaattgatttacctttctgaattatgtataattacttcaatgtgagagcaatctttctgcctacagcctgtctgaggcagtatttttaagagaggatattagtatgagtgcacaaaatcttactttattgacagacctgtatgagcttactatgatgcagggatattttgaaacacaggaaaatcagactgttgtattcgatgttttcttccgtgacaatccgaacaaaggcggatattccgtcatggcaggactggatcaggtcattgactatattaaaaatctgaatttttcttatgaagatgttgattatttaagagggctcggattgttcagtgaggattttcttcattatctgagcggatttcattttagcggagacatttatgcgatcccggagggaagcgtcatcttcccaagagaaccgcttctgaaagtcgtagctccgatcatggaggctcagcttgttgagacagcaattcttacaattctgaatcatcagtgtctgatcgctacgaaagcttcccgtgttgtttatgcggcacaaggagacggtatcatggagttcggacttcgccgcgcccagggaccggatgcgggactgtacggagcaagagctgctgtgatcggtggatgcgtcggaacttccaatgtactcgccggcgaaatgtttgatgtaccggttatgggaacgcatgcacacagttggatcatgactttcaaagatgaatatactgcatttaaagaatatgcaagattgtatcctgatgcatgtacactgcttgtcgatacttatgacacattgaaatccggtgttccgaatgcgatccgtgtttttaccgagatgcgcgaagcaggcatcaaaccgaagagctacggtatccgccttgactccggtgatctcgcttatctttctaaaaaggcgcgtaagatgctggatgacgccggattccaggatgctgtcattgccgcttccaacgacctggatgaatttctgatccacgatctcaagatgcagggcgctgcaatttcttcctggggcgtcggaacaaaccttattacatcaaaagactgcccgtcctttggcggtgtttataaactggccgctattcaaaacgcagatggagaattccagccgaagatcaagatttctgagaatattgagaagatcactaatccgggaaataaaaccatttatcgtatttacgataaagaaaccggtatgctgcgcgctgatctcatctgcttcgctgatgaaacatttaacacagaggaagaagatctgcttctctttgacccgaatgcaacatggaagaaaacacttcttccgggtggaacctacacaatgcgtgaactgcttgtcccaatcttccagcatggagaatgtaagtatgagtccccatctgtaaaggagattgcagaattctgtcgtcaggaaaaaaagacgctttgggatgagacaaaacgtctcttcaatccacataaggtatatgtggatctttcccaaaaactgtacgatacaaaaaccaagctgctgaatgaagcacatcattaattactgtcactatataacgaaatggagttttaattattatgaaataccaagtgattgtacttgatctagacggtacactgaccaattcaaaaaaagaaataacgccccctacaagggacgctctgattgaaattcaacagaatggaaaaaaagtagtcctcgccagcggtcgcccgatcaacggtgtcgcacctctggcagaggaattatatctaaaagaatacggtggattcatgctctcctttaacggtgcgagaatcacccgctgttctgacaatgcaattatttataataaggttatcccacaggaagtcatccgtccgatttacgagacggtaaaagaatatcctggattggaccttatctcttatacggataaagtaatcctctccggtattaaaagtaatgaatacactgagaaagaagccaccatcaacagcatggagatctgtccggttgaggacttccctgccgcacttgatttcccggtcaataaaatacttatcccaggtgaaccttccatcctggaagacctgatgccgaagctgcagaaacaataccacggactgctcaacatctaccgttctgagccattcttcttagagatcatgcctcagaatatcgataaagcacactctctgcagaagcttctgaacagtatcggtctcactgccgattccatgatctgctgcggcgacggcttcaatgatctgtccatgatcgaatatgccggtcttggtgtagcaatggggaatgcccagccggtcgtcaaagaatctgctgactttatcacaaagtcgaatgatgaggacgggattcttcacgttgtaaatctttacatgagagattaggccttctctccggaagctgcgcaagaatcacagccgcaaatacaagggcacatccaaaaagttcccttggagacaaggtttctccaagaatcacccagcctgcaagtactgaaaatacagactcaagacttaacagcagagatgcaactgtcgggtctgtatttttttgtgcaacaatctgcaaagtatatcctaccccacaagacatgattcctgcataagcaattggcttccatgcctgcaatatagaataaatttccgggtgctcaaataaaattgtcggtatcatacataagattccacaaacaaaaaactgaatacaggacatcttcactccgtctgcctttggtgaaaaatgatcgatcacaagaatatggaatgaaaaagcaacagaacccagtaaaatataaaaatctccttttgcaatggataatcctgatgtcatacacagaaaatacattccgatcactgcaagtaccacaccaatccatactttaattccggcctttttgccaacggccagccccaggattggaacaatcagaatatataatgccgtgataaatcctgcttttcccgccgttgtatattgtatcccaatctgttgcaaggaacttcccagcataaggaaaaatccacaacaaataccaccgatgataagtgttttcttattttgtataacttcttttccttgtgatatctcctcctttctcttcttatccaatacataaatcaccggaatcaatacgattccaccaagtatacttctggcactgttaaatgtgaatggaccgatgtagtccatcccagcactttgtgcaacaaatgctgcgccccaaataagcgcgattatcagaagtattaaattgtttacatacctctttttcaatttttttacctcttttacaatttttagccactctctagtatacaaaaaaatctgccgattggcagatttttttgattttttcttattacttttcttaatagtgcataattactggatctccaacctggatcaactcatacaatttcccggcatccgaatagctcatattgatacatccatgagaacctctgtaggtatatacatttcctccaaaactgctctgccatgttgcatcatgaaaaccaacaccggaatacgttacacgcatccaatattttacaggagtttcatactctcttgttccatccggtcttaaattaccgcgcagtactttattctgcattcgttccaaaatcgtataaactcctgccggagtacttcttccgcctttcggaagtccggtcactacatctgctgacattaaaacttctccgtctttgacataccacattttctgattcgtcagatcgacttctgcataagtggagccccaatcctgcgcaccatgcgatgccgcagtctttccttccacataaaccggctctcgacttattgtttctccgctttcaacattcgcgagaagtgtctcatactctgccttttcattaatctcccaaccgtaagttccaccggaaacttcggttgctcttccatccggtgtagtgaattgtctggtctttcctgcagtatcatactgctgtgcaaactgcgtcacccattcctgtataagttccgggtgaaatgtcaccacataattctcatctgctgtcacccactgtgaaataattgttttatcaaccacaaccggtgtatcaagtcccatctcataagttacactcgcattcaggtatgcattcatcgcatcgcacgcctgctgaacttccaatgactcctttgtatatggcggctgtacataacatcctgcttcatcaagattcaactgctcttgcagtccctctatcgcttggactaccgctttcttcaatgcatctgcatcgattgccgtcccttccgtaatgtctcccggaacaaacttttctccgttaaacaccggcatagaagatatcggctgtacctgttctgttgtcatagctgtcagacttgcaatcttcgcatctaatgctttctcatcataatctgcacttgccgtgatggacaatccttttccctctcccgaccatgctgccggccacagaaaaacggactgctcctttaatagtttatctatcactccattctctttatattcaacagagatctcttttcctgtaatcatatcagaaagtcccgcatgttctgtaatcttcaattcatacttcttaacttctgatttcagataatctgccacatcttcttccttagcatatgaaaaatctttcccgttaacctttgtatttggaagaaaatgactcataaaatacaaagcggttcctatataccctaaaaccaagattcctgcaactattccaaggctaatccataaccattttttcttgttgtcccccatcaaacactttctcctttgtaattccttctttctaatcaatcagatcattctgaaatctcgacaaatgctcatacggcaagatcaatcttcctcgaaacaatccacacccgtcattgatcaaactgttattcatcgctgcaaacatatttacatccagcttcgccagatccagtcccaacagcttcattccgcgctcatacgcctcatcaaaataaatgcacttacctcttggaatcgcatttcttctggcgcgctctttctcttgttttttctcatatcccagatggtttgccggcccaatctctgcaatatcatccatttgctttgtacggatctgaacctcaatataacttcttgaacagttatcatagaatgtaatgtgcagtgactggtattcatccggccggctgtctgaaatatagtctctgtaatatggtctgacattgtcatccatgagtggagaatgactttccatcacaccatttgccggctccgctgtaaaccctctttcctcaagaaaacccggtagtacatttgctatttcatacaaacactccagctctgcaatctgacgttcttcttcattttcataatggcatttcggcatggagattacgatccggtatgcgatcaagtctcgaaagcagctaagactgcgctttaactctgccgttgtcggatactttccatattcttcgtaataatctgaaatatacttgacaatataaccattaaatttctcttccgcacggatcaacgacttgattcttccctttactgtaaatgcaagatatggatattcttttgtcatatatttatagaattcccgaacctgctgtgactgggtcgtaaggaattcattatgttccaaaagttctctgatctgaatcaggaaattacaatgtatcagatcaatttcattttttgtctttcgtgcatcttcccttagatttgtaatgtaattctgcagcaccctaaaaatggtatcgcctgaatacagataatcatttaaagttatcataacgtatccctccacgaaaatgtatctctgtgtttttcattgcttcttatcagcacgccaaacatgatggccttatttcatctattataacaatccgatgcgacaatcgccagtcatggagctacaaatgatacttttcttgatttttttagagagattatataaattttgtctaaaaaccttgaaatttttataaacaatcctataatataagtgggttgaaaagcgctaacatttatgttttctggaggtgtttgtatgattagttttattatttgtttagcgttacttattggcggatattttgtttatggaaaggtggttgagaacacattcgcacctgacgacagagaaactcctgctgtcagaatcaatgacggagtagattatgtcgttatgccgcaatggaagttattccttgtgcaattacttaacattgccggtcttggacctatttttggtgccatgcagggtgctttatggggaccagtcgtattcctttggattacattcggtacaatttttgccggaggtgtgcatgattatttctccggtatgctttctgaacgaaatgacggagcatcgatttctgaggtatgtggaatctatcttggaaatgtcatgaaaaatgttatgcgtgtattcagtgtagtacttcttgtcatggttggtactgtatttgcagtaggtcctgccggcttgatcgtcactttgcttgggaacaaaggtatcaccggacttcttgcaaatcctgaattctggctttggattattttgttatattattttatcgcgacctttatttctattgataagattatcggacgcatctacccgatttttggtatctgtctgatcatcatggctcttggtgttatcatcggtatcttcacaaatccgaattatacaattccggaaatctggagccactttacaaatatgcatcctgacggaaaaccaatctggagcttcatgtttatcactgtagcatgtggagctatttctggtttccattctacacagtcccctctgatggctcgttgtatgaaatctgagaaacagggacatttcgtattctacggagcaatggtagccgagggtgtgatcgcactgatctgggcagccgcaggttgtgcaatttacaaagtaaccggtggtctaaacactggattaagtgagattcttgcaaatggtcagtcagccgctatttacgatgtttgtattaaaacaatgggaagcatcggtgtagcattggcaatgatcggtgttatcgtatgcccgattacttccggagacaccgcattcagaagtgcccgtcttgtacttgcagactggttcaagatcgatcagaataaaatgcagaaacgattggttctctgtgtaccgcttctggcagtcggtgcttttgtaggacatcttgattatgccattgtatggagatatttcagttggacaaaccagactttagcaatgatcgttttgtggacagcaagtatgtatctgttccgcgagaagaagaattactggatcacagcagttcctgcaacatttatgagtgccgtttccatgacctatttcttctgtgcagatgaatgtcttggattctctacagcagttgcttatcctgtaggaattatcctggcagcattgttccttggaatctttatctgggcaacaagaaaacctgccagaaaacaggcttaagactataggactgtgaaaaacagacagacatcatgtttttcacagttcttttaaaatatacaaatgaaatgagatgatattatgtttaaaccacaacgacttggaactgtaacaatcccggatgctgaattaaccactgacaaaaaaaactgcaaaaaaataggcccttgcggtgttggggaaaaagcaatttatttaaacagtttttattttgacagacgttattacataccaatttcttccatagaaagaatctttaaaagaattgccatgagcaaaggtggttttacaggaaaaggagcatttggaacgttatcctatctcgtagttgtatatgaaaatggaaaagaaaaacaatgtaacttcaaacatgaagaagatgtagatcgccttttggcttatattgaagaaagatttcctcagattccgctgcacagcatagaagccgagcgaaaactggaagaaaaaagaaaatggctggaagaaaagcagcgcgaacgcattcttccggaagaaatcaaaaagcggcttaccaagcttgaacgcgcagaaaattatcttaaaaagcaatccgattactacatggatctgagcctgtcggcgaagaaaaagagaacctatgacagaagcaatcccgcttataaatgggtcgctcttgctgttgtaatattgggtatcggagcattcctttatggaatctactcccttctgactcatgccggattcggtatgtatttcctgttatttggattggcagcaattttcctgttcgcaggagcgaatgtattgccaacctccaaaaacaataaaaaatatatcgaaaatcagctggaacgatccatccagcaaatggaagcctatatccagaaatatcctgactttccggttccagcacattacgcacatccggtcgtattaaagagaatgcaggatatcatgaaggatggccgtgcacaaacgattcctgaagcactcacggttttaaaagatgatttgaaagctctgaattctaatgtaacagttgaaaaagaagagtatgatgaaatcgttgcaatcaagtcaatgtttctggtaatggattataaatagtttttcacctgatttttgccctctcaaaaagaatagcagctgttctcacaacacacttgttagacagctgctattcttttccacattcctctcattttataagaaagttattcccattttactctttaattgttcccttttttacattttcctggataatctgatctacaacttcaaatattttttccgatccaagtctcgtcttcctctgacgaccataaacctgatctgcacatactccatgctctttccaatcatttccaccattgctgttattcagcatcagcggctgtagattatccattgcatgtgcgaacttagattccgctgtttcaaatgcctcgaactcatcaaaaagagaaatcagctcttgtttctgatcttccggaaggattgaaaaaattctttccttcgccgcatcttctcttgctttctgagttttcaaaccttctgtatcatatgcatacgtatcacccgcatcgatctccacaatatcatggatcagacacatcagcattacctttgcaatatccaccgattcgtttgaatgctctctgaaaagatatgccatgatcgccatatgccatgcatgttctgcatcgttttcccgtctgccatgctctgagagatgtgtctgtctcagaatgtttttttccttatctatttccaatgcaaaatcaagctgtcgtttcaatctttcatccatttttctctgtctccttgttctaaacttcattaccttaaggtggaaattatcaacctccgcattttgccgtaccgctcaattcaaatttactatactacattttttcacttccgtaaaatgcaaaaagcaaactccaaagaatttgctttttgtattatttcgttctcagctattctatttcagttcatctaaaatagatgctccgatcgttccctccggcatctttacgtcgaaattatctgcaatcgttgcaccgatcactgcaaatgtatctgaatccggcagttttccgtatccttccatagatggagaatatgcaaaaaacggaaccatttctcttgtatggtctgttcctgtgtgcgtcgggtcatttccgtgatctgcagtaatgatcagaagatcatcctctctcaatccaccaagaaattctcctaatttcacatcaaatcgttcaagttcctctgcgtatcctttcacatttctgcggtgtccccacaatgcatcaaaatccacaagatttacaaagcacaagcctttgaaatctctttttgaaatttcgattgtctgctccattccgtgaacagaacttttggacttatttgattctgtcagaccttctccatcgaaaatatcaaaaatcttaccgactgagatcacatcatatcctgcatctttgagtgcattaagtgctgttcttccgtatggtttcagcgcataatcatgtctgttacttgtacgcttgaactcaccttttttctttccaacataaggtcttgcaataacacgtccgactttccactcatctttcatcgtaatatcacgtgcaatctcacagcagcggtaaagctcatccagtccgaatgtctcctcatttccacagatctgcaatacagaatctgcagatgtatagacgatcatatgacctgttgcaatctcttcttctgcaagttcatcaagaatctccgtgccactggcactcttgtttccgattaccttatgtcctgttctcttttccagttcgtcaatcaattccttcggaaatcccgtctctgtaaatgtcttaaatggcttcgtgatatgaagtcccatcatctcccaatgtccggtcatcgtatcctttccggtacttgcttctttcaggaaagaatagtatcccatcggtctttctatcggtgccacctgtttcagtggatgcaaattggcgattccaagtttctgaagattcggaatatgaaattcatccacagactcagaaatatgtcccattgtatctgttcctgcatccccatactctgcagcatccggcattgctcctgctccgaatgaatcgatcacaattgtaaaaattcgattatattttttcataaaaatcacaccccattacatgtttacaacgacctttgtaacaagttccttaaatgattttgctacacggtctgctgtctcctgtacttccttatggttcaattcaacttttgaaattcctgctgccatatttgtgatacaggaaattccgcagatttccatacccatatgacgtgctgccatagcttcacatgcggtactcattccgactgcatctccgccccagctctgtgcaagtcttatttctgccggtgtctcatagttcggtcctgtaaactgaacgtaaacgccttcctgaatctcaatgccacactccgctgcacatttacgaatcacatcctgaagacgcttgctgtacacttcactcatatccgggaatcttgttccaagttcatcaatattcggtccgatcagtggacttggaactcctgttgtaatatgatctgtgatcatcatgaaatctccggctttataagatggattgcatccacctgccgcatttgtaagaagaatcttcttcgccccaagcattcccatcagacgtgtcggaagaacaacatcagacatcttatatccctcataataatgaacacgtccctgcatgatcacaaccggtgtatcctctacataaccaaatacaaagcgtcctttatgtccctttactgtagaaaccggaaatccttcaatctctgtataatcgatggtctgctcaatcttgatcccatctgcgaagtctccaagtccggatccgagaatcagtgccacttctggtttaaaatcgatcttctttcttacactttcaagacatgtaactaatttcttatacataatttccacactccttttctttgttttctgaacttgaaaaccggtaacatttcgtgtaaatacttatgcgccataaacttccctcattatccgatacaatttatcttttacataatcttccgcaaaagccacatctgctgcattcttcattaaaagatagatttcatcatcttgaattccgtatgtgttttgaataaattccagttcctttgtcattgttgtatcactgaccgtacgattgtccgtattgaccgttacttttaaaccgccattcaagaactctctgatcgggtattcctccggtcctgctactgcttttgtctgcagattactgattgggcacatctcgatcccgattcctttttcggcaagttctttgatcagatcactatgtcctctcattgcaattccatgaccgattcttcttgccccagcttccacggaatctatgatgttctgagcacttccacactcccctgcatggattgtgaacggcatcccaatcttttgggtgttctggaacagatttttaaactctgacatagggtagatggcttctgctcctgcaagatctgctgcacacaatcctgagccaagatattctctcgctgtacgtatcatgcgccagttcatttcttcgctgtgatgccgcatcgcacatacaatcaggccgaagtcaattccgaactctttcttgcctctttcaagacctcttaggactgcttctatcactttgttacaattcatatcatctgtctctgaaagaaggggggcgaaacggatctcagaataaatcacattctcctgtttcatacttctaagcacatcataaccggcttcttcaagaccttcttcatcttgtaagcattgccccggcagatcaaacttttccaggtattctgcaagactggtacagtcatttgacacactcagttcttctcttcctaccggtcttcccagtctctttccaacaaattcccgactcagtgatccgtccagatgacagtgcaattccacctttggcaattttataatctcttcccttgtcattgttaaatcccccttcctttgtcagcttttaattcgtatatattataccaaatttaatggtccaaacccaagaggcatcagctcttctaaagtataaatttcatatcgttctttatccactgcaagaatgatctggaatgtcttcggattacagaattccatcatgacctgacggcatacaccacatggcgcagtgtattccgtcaattttccatctttgccaccgacaatgcagattgcctgaaaatcacgaacaccttcgcttaccgccttaaaaaatgcagttctctccgcacagtttgttggtgtataagatgcattttctatattacatcctgtatagatctttccgctctttgttaaaagcgctgccccaactttaaaattcgaataaggtgtataggaaaacttaagttgctcaatcgctgtatcgatcaatttctcaaccataacctgttccatcacagcctcctcttttctttcatatgctactacctgttttcttatttgttttcctggtctgctttgatcaatttgcgaattgcttcaacggctacctggattgccatatctgtatcatgagcaactggattctcaagaccaagtttctctctttcctgatttgcaacaacaagaaaacaagaacctgctcttgctcttaatttagatgcacagataaacattgctgctgattccatctcagatgcaaggcatcccatcatcttccatgcttcccatttattgataagttcatatcctaccggcattttttctggctcatgctgtccgtaaaatgcgtctttggactgaacaacacctgtataatgtgtgaagtttttctcttttgctgctgcaaccagtgcatttgtgacatcaagatctgctactgccggatactcgatcggtgcatattctttggatgttccttccatacggatcgcaccagttgcgattacaacatcaccactcttaatctccgtctgcattcctccgcatgttccaattcttacgaaagtatctgctccacatttgtacagctcttccatagcgattgatgcagacgggccaccgatacctgtagatgtaacgcttacctttactccgtccagtgttcctgtataagtaatatactctctgttatctgctaccaaaaccggatcatcaaaatactgtgcgatcttaacgcaacgttttggatctcccggcatgatcacataacgtccaacttctccttttgctacctgaatatggtattgtctgctcggatcttctgaataatttttcataattttttcacctctctaccacttcatatcttatgccattgagggcacaactaccttgaacagtacctgtagaaattcttgacttcttttaatattactttactctaatatcttgtaaaactcaagctacctattcattgcatgaaataaaactcgacaaactttcaataatcttgttcgaaagtcccttttattaaaaaaaggggtagtctcaaaacaagaaactcgttataatagggggcagaaaatgaatggaggaattcaaaatgaataatgtaattgagatgaagcacccactgattcagcataagatttcccgattaagagacaaaaatacaggaactgctgaattccgtgcgctggtagaagaaattgctatgttaatgggatatgaggctttaaaagaccttccattagaagatgtggaagtcgaaacaccgattgaaaaatgtatgaccccacagattgcaggcaagaactttgctattgtaccaatcttacgtgccggtcttggaatggtaagcggtcttcaggctttagtcccgactgcaaagattggtcatattggtctgtatcgtgatgaggagacacatgagccacacgaatactactgcaaactgccaagcccaatctctgaacgtctgatcgttgttacagatcctatgcttgctacaggtggttctgctgttgctgctgttgattttatcaaacaacatggcggaaagaagatcaaattcatggctatcattgctgctccggagggcgtagaacgtctgatggaagcacatccggatattcagctgtacgtaggacatattgacagagaactgaacaaagatgcttacatctgtccgggacttggggatgccggggatcgcattttcggaacaaaataaatagattttgcaaaacaaaaaagatatcgaagcacacttacatttttcgtgtgctccgatatctttttcatctgtccctggccgaacagatcatttggcttatattttatggtatatttttacatggcagtaaaattggtttaatttctgatttcataaatctgagtcgcttttcaggcatgagcggctcagatttttcgagtaaactttaatgtcctgacacaacttatttaataaaacttacatgtttgcagatctcttcgatcgctttttcttttctctcattaaagactactttgttctcttcaaacaggttgcgtccctctgtgtcaatagatacgatcagtggtccgaactcttttacgcggcagtgccacagtgtctcaggcattccgaggtctctccactgagcatcaacgatttcctcaacttctgttgctgcaacaacagcatttcctgctgggaatacgcagtggattgctccgaattctttacatgcacgctctgtgttttctttcattccaccttttccgatgatcacacgaactccggactcttttacaaattcatactcaaatttttccatacgcatacttgttgtcggtcctacagaaaccatttcaaatttgtcattctcaagtggtctgatgatcgggcctgcgtggaagattgctgcatcttttacatcaaccggaagctcacgtccttcttcaacgagtcttctgtgtgcaacgtcacgacaagttgtcatacttccgttcagataaatgatgtctcctgcatgaatatctttgagatcctcagctgagactggtgttgttaaaatcttttttccatcttttatttccagcattataatgtcacccccgaatgtgttgtgattgtgtagttaaggtccttatcaaaaacaatgtgtccacgtctgtgtgaccagcatccaacattaacagcaactccgatggtggatggatgtcttgctgtattctcaatatgaactcccataacagaatactttccgcccattccctgaggtccaagtccaattgcgttaattccatcctcaagcagtttctccatagacgctgcacgttcattttcattgtggcttccaagcggtctcataagagctttcttggaaagtaatgctgctgtctcaacagatgtagcaacaccgactccgacaagcagcggaggacatgcattcagtccgtaagatgtcataacatcaaggacaaattttgtaactccttcgtatccttcgcctggcataagaaccatagcttttcctggcagtgtacatccgccacctgccatgtatgtatagatttcgcactgatcactgtccggtacgatatcccagaatactgtcggtgttccttttcctacattctttcctgtgttgtactcatcaaatgtctcaacactattatgacgaagcggagcttcaaatgtagcctttacaactgcttcttttaaaagtccttccagttctccaataagcgggaagtttgttccacattttacccagaactgtaatactcctgtgtcctgacagcttggtctgttcagctcttttgcaagaacctggttcttctgcattgtctgataaataacctttgaaagcgggctgtcttctttttctgcaagctcgtcaatctttgctttgatgtcatccggcagtactttaccaatataggaaacaaagttcgccatataagtagtaagctgctctacctgtgcttttttatccatttttaggtctcctttcattactgctgcaatttccagtaactttgatgattaggttagttcattgttttatagtttcttttatatctcactccaacaacatgtcttcttacgggaagaatggaaatgcgattggaaggataatcatacttacaactgttgcaatgatgatcaatgggaatcctgcttttacatagtccataaacttatatccaccggctccgactaccattgtgttcgcaggcattccgattggtgttgcatatgcgcaggaaccaccgattacacatgccatcagtaccgctcttggatccgctcccatcccctgtgcaattgagagacagattggaaccatcagtgctgttgttgctgtatttgacatgaagtttgtcatgatacaacacagcaggaatacaacaagtgtcaggatatatggagatgggttcgcacccaacgctccgattactttattagcgatcacttctccggctcctgtctcctgaagagcagatgcgagggaaagtgtaccaccgaacaggaagattgtcttaagatcgattgacttaagcgcatccttctctgagataactcctgtgaggatcagaagcagtgctccgattccaccggaaatacaaagcttgataccgattttatcttcgaaaatcattgccagcaatgtaaataccaggataatcagtgataaccactgtttccatttcggcacattatcgaaattctttgttgtatcaaaagctccgtcatccttcacatcatgacttggaagcagtttgtaaccaattgttgcgtagaaaataattcctacgatcagaatcggcataccgacaactgcatactcaaaaaatccaaattttagtccgatttcactgagtgcactctgtgcgatcaggtttcccggtgcaccgatcagggaaagatttcctcccattgctgctgcaaatactagcggcatcagaagtctggatcttttgtatcctgattttgctgcaattccgataactaccggaatcaggactgctgcagttcctgtgtttgacaggattccgctcatcaatcctacgatcaccataatcgcaatgatcagcattctttctgtcttggcgaacttcgtaacaattcctccgattttattcgccattcctgtttcaaataacgcacctcctacgataaacattgctacaaaaaggattacgttactgtcaatgaaccctgcaaaggctgttttcacgtctaaaaccccagtcactacaagaccgatacagacaatcattgatgttactccaagcggtatcttttctaatacaaacatgattaccgcaaacaggagaaacagaagagttattgttgatggactcatatgttttcctccattcctttgtttctgtttttcttttacttcttaactttttcaaatctttttcagctattatttttagcttcgctttaagtaatttccggccgtttcgattacctctctgctatggttgtattatagaaaatacaatcgaaaatgtacattctgaaaaaaatatggtactataagaaaaaactatggaaacctttatcacacaacgttttaaatatggtctttgagaattgttctcattctcctttgaatggaaaaatactttacaatagtgattctttacagataagaaatggagatttttacaaatgaaactgacacaactcgaatatttctgtgttgctgcaagataccacaatatcacacgcgcatccaaagagctttttgttacccagccttcggtatctaacgcgatcaaagctttggaagaagaattcggcgtgaatcttttctatagaaacaataataaactgactctgacaccggaaggtgaaaagttctatcaaaatgccgaagaacttttggctcatgcggatgctgtcagatctgaactgcacgaactccgtaagcagattacacctgtccgcatcggaatcccgccaatgcttggaaccatttacctgccggatatgtatctttctttgaaggaaaaattccctgacgtagatttccgcctatatgaatatggatcgatcaaagcctgtgaacttgttctagaggagaagcttgatcttgcgatcgtcaatgcagaacagtctgcgattaataaatgcaaccttcatattattgataatgaagatctgctcttctgcgtatcaaaggatcatccacttgcagaacaatccacgcttcttttaaacatgctgactgatgagccattggttctgtttaacactgattctgtccaggttatgacactgactcgtcagttcaaggccgcaggagtaaacccacacattgttctgaacaccagccagatcacaacactgatcaacatggtaaaggcagataagattggctgctttttatataaatctatggtggatatgtaccctgatcttgtcgggatacctgcctttcctgcaattgaacagcgcattggtgttatctggagaaaaggaaagtatcagaacgctgtgaccgaaaaagttattagatatttgaagaattattaatcgttatgccaatcaatttatttaacaactcattaatttttaaaggcggatacattgtactgtacccgccccttatagattttaattctctttttctgccattttctttaagttctccttgcatttctcactgagaaaccgcatccagcgaataatacccgactcatttcttatcttctattcatataagaaatcgacgacaacgtctgcaggtgcgccggacagatatctctgcatgccagtgatttcgaacattgcttcgcaaaatgttcttcatactgtttctccaatgcccgctttcgattcagactggaagaatgcagaagatacgcattatttgcaaactctgcgccatagaaatcatcttttgccccaagataactcggacatacttccagacaaagtccacatttcagacactttgctgccgaatactgatgatcatgctctttcggatctggatgtttccgaattccaaggtacatcagtgcttccttctggcgttcccatatcacagatctgtcaacgatcagatcttccacaaccggaaattttgtaagcggttccagccttaaaatctctgtatcatctgtattaatgaacactccacatgccaacgcaggatgcccattgatcaccattgcacaacctccgcacattttctgcatacaaccacattcccaacggatttttctacattgttttcctttgatatcttccagctggtcacgttcatttaacttctcaagaatcgcagctactgtaattcttccctctcctctgaaatgaaaaacttgccaatacggcgctgatcttcggtcatcctgtcttttaattcttactttcatctcacagcgcctcccttttctcctgactcctgttcaaaataaatcctgattctttcgtctttaaactctgcaacggaacatttcatgaattctgatttttcacctggaaaatcttttcggaaatgagctcctcttgattcacgtctttccacagcactcataagtgtcgcttttccaagaacagccatcggatatagtctgtaattttcataaacagataccattggatcaatcggaaatgtcctcagctcattcaggctggaatccaatgcgtaaatactatcctgaagaacttctccatcacggatcaaatccataccataactcatgatcttcattaatttacgcagtgttgctgtcgctgaatacttgccccgatactctgacatctgttccatacgatcaattttctcctgctcatgctcaatataaggaacaaacaattcttcgcacatcggctgaccctgtccctcatgcaccgcatgcgctgctgttcttcccgaatgaactgctgccatcaatgaatttccaccaaggcaatttgcaccatgatattttgacgcagcttctcccacagcatacaatcctgcaatattcgtctgatgcattccgtccactttaataccacccataaagaaatggattgccggcgttacagggatcgattcttttgcattctccagataaacctgtccgggacacattgcaatttctcttgcgacaagatctcttgacatcagattgccttccgtgccatacttttcttccatgaaataaacactgtgacttctattcttataataaagtctccaaccttcacttctgacagattccgagattataaccctcttatttcctctctgaaccgtagtcggataatactggataaattcgagatttctcagctgcactccctgtaaaaaaagctttcctgtcacataaccatcatttaattcagatccagtggtttttccatatagcttgttcattccgccggtagcacagattactgcatccgcataaaccggaatcaacattttagattctggattataaaataacgctccataacacttttcatcccgaataagagcggaataaaaatacaatccgattttcttttctattttacctttaatctcatactccaggcatttctgtgtcattgccgtaataatctgttttccaatggaattacctgaataaacagttctttttctactctgtcctccggaagctttcactttccatgtatcatcttcatttcgatcaaaaagaactcccatctcatccagccatttcagatgttccggtgctttctcacagagatttctcacatcctcttctttttcaagaaaacacccactctccagcgtatcattcgcatgccacactacagaatcctcctctgcggtatcaactactgcattgattccttctgctgccataactgactgtgtacgttctgactgaaccggtgatacaagaattacctcatcatcaagttctgctgcttctattgcagcagacatccctgcaattccatttcctataatcaataccttcatttgtcatcttctctttcctaaaaatctcacctgttcctacaatcttatccgcgcagccaccgtaagaaccattaataatccacagatgatccatgttacataatccacaagcttctccatcctatcgttcttcaacaaaccaagcgtcagcatagaacggctgaacgatacactcagatgcagaaatgccgcacctgcaaagagaatctccgtcactaatacaagaaactttgctccaccagaaaatgatgctccacttattataagatgaagtactctcatgtgtggatacaataaaatcagtataacaattccactgattctctgcgtaattaatctccaattcgctttcctgtatctgtgaaaattaagtattccacgtcttggataataacttacaatacaaagaactacatgaatcaaaactgtcgccacaatccctcctgcgagtatctgacaatcagaataatcctgtccacctgtcaacataggaatggacatggtaagcatatgtccaagtaagaataacgtaagcatccaggaacatactgcgttccatttctttatcattaatcagcaccccttctgtatcttattctctctacttttaatcttccacataaacagcgcgggtacgctctccatcttcgatcaattctacctttggaaaactttgtatatactgcttaaattgtgagtatccataatcccgtactttaaaatcaccaaactgaatacgaattcgattccccagtgttccaagagagatcccctgatcccctgtcatctggatctgacggataatatactcttcaagcatatctttcttactcttatcttcatacagagtaactgaaactttcgttccttcctggatcagctttaatttcggtaaagtttcaaggaacttggataacaaactgtaaccataacgtcgaacatcaaagtccggatatactttgaccagccggcttccaacttcaccaagcccggtttccctgtcgttattctggttttccgtaatgatcttaaccacgatttcttctattttttcctttgataccttttcaatcttttcttttgaacctcttccattcgacgatgataatgaagcaccggaaattttcttctgtccccttccaaacacatgcggatgataagactttccttcgctctcttccttctctatcgtgttgtcttccagaagcacctctaatacggtgaagatatcacaggctttacggaacggaagcggtgtcttgtcctcacccattccgattaccatctttccactttcacgaagccggctcgcaagctttgtaaaatcactgtcacttgataccagacagaacccctccaattcacttgtatagagcatgtccattgcatcaatgatcatggcagaatctgtagaattctttccctgtgtataactgaactgctgaatcggcgtaatagaattttgaagaagttcttccttccaactcgcactgtttgactttgtccagtctccgtaaattcgtttgtaagtcacgtttccatatttagataattcatccaggattggcttaatatattttgcagatacattatccgcatcgattaagagtgcgaaacggtcttccatgtctgatactcctctcctgcaagattcttccatgtaaatacaccgttttcataaatcatataactgtgctcggatccttccttcggaatcgagacagagcctggatttaagtactgatattttccaccgttcatatcaaggatttcctcacatgccggaatatgcgtatgtccgttcaaaagaatatctccgtctttcagcatcggaagcttatgtggattatacacatgtccgtgtgttgcaaatattgtaacatcactgttcttttcttccggatctcctgacagattcagataacaataatctgccagaattgggaactccaataccatctgatccacttctgtatcacaatttcctctcacacaaagaagttctttcttcattggattaagcattgcgatcactgtcttcggtgcatatccttccggcagatcatttctcggtccatgataaagaatatctcctaataataataatttgtctgcgccttctcttttataagcctcaatcatctgttcacaataaaatgctgagccatggatgtcagatgcaatcattaatttcatttttcacgtcctcctgtctttctaaatagtttctctataataaatgaaaaaagcagtgactcttttcttgagacaccgcctcttattattttgtgcctgtggatattataacacagaatgaatcacagagaaaaatattttcctacaatttcaaaaggcgccggacccacactcagcacagctttatggaattctttctgggattgatttccagattttatccattcctttttcaactccagaaattttatatatccgatataatatttcaaataatttcccggcgatcccagaatcagattatagattttatcaatcgttttggcatctttgattccatatcttgcataaaattctaccgtatccattctgctccatccttcgtaatggattcccatatctgccaatgcataaagtgcaagaatcactgaactgttcttctgaagaattgctgcctgagtcttagataacggcatcagataatagctgcacatctccgcataagttgcccatccttctacatatccgccaaaatttaaaatactcctgacaggatcaggattcgtgctttcaaaaaagattgtctggtacagatgtcccggatacccctcatgtgccaacgttgtaaacagtgccaaatcatctcgcatctgtatttggtttacataaattacattttcttctgtatagtcaattgccggtatcatataaaatgcgggacttaaatgttcctgcatttcctccggtacatattttatccgcagagaagtttttggaatctcaggaaatgcagtccctatccctttttttaacttttctaaaattctttctgctttcccatcttccaatattgctgctgcctgcttcgcttcgttgactgcttcttccatacctgtaatatcttctgaaatttgtctgcgagttagttgctcgagctcttgaatcgtgtctgtcactcctacactctgctgtatataccattcgtagtattttctcccttccggaaaataacacaatcccttttcattcgttcccttccctttcaattccttaaccgcctgtatcaaatcctcatacgccggataaacctgctcttccatctgcctggcgttctgctgaatataatcactcttttctttttcagacagttcctgtaattcacctattctggacacaaatgtcgagtacagataatttccatttcccattgcaagaaatgcattacattgttctaacacctgatccgccatttcatctgacaaaaacaatccgttgtctgccttttctctttcaaatgcaatgatctgttgaaaataatcccttgtctcacttaaaacatccagatacgcctccacatctgtcctgtcataaaactgatattcagataatacaattggaatctgcgtctgtactccattgactgtatttaacggttcttcataatacagataatccgcttcttctctcaaacttctcagatattgctttaacagatcgtatgtaattttattctttacattcagtttttcataagaaaatgcatacaatgcctgctgtatattctccgctgctgtcttaatctgagtactgtctgtctgtatcgttccatatgctgtatccgctttatcaatcccatacgcttctggctcttttaatgtatagtgcagactgatctgacttgcagccacctctttgcaaaacaatttttctgtaaacgatgtaaatctttcattctccacctctttactgctctttttttcttctaaaaatgttgcttcacaaccgtttaaaaagaaaatagaactgaaaagaatactgatactacatacaatacttacacactgcttcttccgccttttccaaaattgaatcaacatagcagactccgacagttatttctctaattttatgcattggcttccttatttatacatcgctgaaatttgtttccaaacagtaatgcatcccctctttatttgtgataaaatacaactatataagatacaggaggcgttgtgtatggccagcttaatatttgaacatttgaaaaaagtatatccgaacggattcgtatctgtagacgatgtcagcctctcgatcgaggacggtgaatttgttgtattccacgggccaagcggatgcggaaaatctacaattttacgtatgattggcggcctggaagatattacttccggaaagatctatcttgataatacctttttaaatgacattcttccacgcgaccggaagcttgccatggcatttcagaattacgctctctacaagtacatgaatgtatatgataatatggcacttggactgaagcttcgtgatcttccgcgtacagttatcaatacccgcgtaaagactgctgccgcttttcttggaatttcagacattcttacgaaaaaaattcgttctatttctgattctgagcgccagcgtgttgcactcggtcgggctattgtctgccatccaaaagttctgcttgtagatgaagattttgcccatcaggatgatgatcttcggaaagatatgatccatgatattctcaagattaacaaagagcttggaattacggttctttatgtcacaaataactacgaagaagccgtttccctgaattctcgtatcatctttatgaaagacggtaaagtaattgaggacagcatttaagctgtcctctcattttttacccagacaactttcaaaacatgcttcttatgatttttgcttctccaggtaattataaatttctcgcttctgaacgccgcggtctttcgcgacctttttcattgcttctttgcgatcgagcccctgagaaatataatgctccatatgatcttcgatgctcatatcttcccagcgcgctttttcttcctgacggatttcttcccggcttctccctgcaattacaatcacgcactctcccttcggatcattcgcctcataataagctactgctccttcaagtgttgattgaaatgctgtctcatgccttttggtcagttctctgcaaaccgttacttttcgatctcccagacgctctgaaagaagtttcaaagtctttaccagacgatgcggtgcttcatacattacgatcgttcttgtctcagcagccatctcttttaaaacttcttcccgctctttcttatctgtcggaagaaatgcctcaaatgcaaatcttcttgtcggaagtcctgacattgtaagcgctgtaacacatgccgccggtcccggaacagaagttactcgaatccctgtttcataacacattttcaccagttcttctcccggatcagagatcccaggtgtacctgcatctgtaattaccgcaatatccagtccttcttccagcttctccaccagtttacgacctttatcaaacttgttatattcatgataacttgtcattggtgtctgtatttcgaaatgatttaacaacttaatactgtttcttgtatcttctgctgcgatcagatccacctctttcaatgttctgatcgcacgaaatgtcatatcttccagatttccaatcggtgttgctaccaaatataatgttcctgccatcttcatctcccatgactttgtaactgttcagttacctttgtttttcagaattatttccgttcttctgcagtaaagtcccatccttcgtatacataatgattggcggctctatcgtcactctgggttttgccccacgcattccttccaccagaaccattgtcggttctttatctatatacggatgaataaactgaatccgtttcggttcaatcttatattcatgcatcttcgtcaaaatctctgtcagccggaacggtctgtggatcatataaaatctgcctttatcctgaagaagccgcatactttctcttaaaatatcatctaatgtacacaacacctcatgccgtgcaattgccttactgtcatctggattccgaagtccatgatccgctaacatataaggcggattcgttgtgatcacatcaaaaaaggccggcttaaatcgttctgccgcctctttaatatctccggttacaatgctaattctgtcttccagatggttatgtgcaacactgcgtcttgccatttctgcagtctcagcctgtatctcaagccctgtaaaatgctttcctttcgtctttcctgcaagtagaaccgggatgattccattcccggttcccatatcaagcacggtctctcccggctttacttttgcaaaatcagagagaaatactgcatccactccaaaacagaattttgaaggattctggatcaattctaatcctccaagctgcagatcatccaaacgttcgcctggtctcagattatttgtcatctaacttcgaagctccctctttcttctccatccgctcaagtgcagcaagtttcttctgctcttctttcgatactttctgtttctttcttctcggacggaatttcagatcatccgctttatactcgcgaatctctttctcgtcattctccagattaacaataactttcacaagtctgcgaagtacactcaaagaatgtactgttccggtcaatccatcacttgttgtcacattatctccaacagaaggtaactgactgttaagcacttcataagtctcttcctcattcgtcaggcaacacatcaatcttccgcagacccctgaaatctttgtcggattcagagacaggttctgttcctttgccatcttgattgataccgctgcaaactctgtcagatacgtgctgcagcataatggacgtccacagataccaattcctccgcggatcttcgtctcatctctgaccccaatctgacgaagctcaattcttgttctgaacacagctgccagatcctttacaagttcacgaaaatcaatacgtccgtccgctgtaaaataaaacaggactttattattatcaaaagtatattctgcttcaatcagtttcatatccagtccatgcttgcggatcttctcctgacaaatcttaaaagcctctttctctttctgacgattcttctctaccgtcttctcgtcctgctctgttgcaatacgaatcacagacttcaaaggctgaatcactgaatcatcgtccacctcttttggtgcactgacaacacgtccgtactcgattccccgtgctgtctccacgattacgtgatccccctgtttgatttcaaactctcccggggaaaagaaataaatctttcccgctgttcggaatcttactcctattacttttgtcatgtatctagttctcctttattgtaagcaagagcagttccattgtcagttcaaaattaacatttgctttcagtctggctttcgccttttcaattgcgtccaaaatattctcaattccttcataagagctcttacttgcacgcgccttgatatatctcagctgatcagaaaatactactctgtctacattcttagttgccttataaattaatacatctctgtaccagattgcgatcatatccagatagtcgttaatctccatcttatatgtcatacattttttcactgcatccatcagttctgaaacattcatctcatcaatatttctaagtaaatgtacaacttcttccttaatctcattgaaatattcggatgtcgcaagcataatcgcttttcccatatttccctgggcaaatgctacacagacatctgctttataatcaggaatctccatctgctccatcagatatttctttacgagctgatctttaatattacgaagtttcatcataacgcatctggaacgaatcgttggcagtaaagcctctgcattctctgtcagaagcatgatcaccgcatattccggtggctcctcaattgtcttaagcaatgcattctgtgcctgggcactcattaagtctgcctctggaataatataaatcttatacttactgctgtacggcttgatcacgatatcattattaacctgtgtacgaatatcatcaacactgatcgtattcggtttctcatgtgtcaccttaataatatccggctgattgccgctctgtgcctgtttacaggactgacattttccacatgcctctccgtcttccgcacgattctggcactgcaggctcatagcaaaaagattcgcaagaagccgcttcccagatcctctttcgccattcagaatatatgcatgcgatactgcatcagcctgaactgcgctcgaaatatacttgattatgtttttgtgccctactacatctttaaaactactcatttctatcacctgccgtgtatcttatttcatctttagcggataatattctcacaattatccacctaacaatagtatattcataattttaacatcattttcttacaaaactatgaactaccatttaagtatatcataaattcacgtttatttctcgcaaaatttcttccatacaagtttccttatcaatattttgaaatctccgcttgattcccgccctttccagattctcctccgagaaatcttctgcatctgcaagaaatcttctgcacagttctgcatactgcggtttcgtctgtgcccgttctctttctaacgccctcgacagtcttaatccatcttctacttctatatataatggaaccataacatcatcaccaaaatattctttcaatgcataatatgactcaattgttccaatcacaagataatcatactgccacaattcaatctgtccatcatctgctgtaaaataagtccagattccacactttgtattgtaagaacgaaactcgatgattttctcctcgtccatcatctcatcaaatcgttcctgatcgacaaagaaatattccactccgtccttctcaccctcacgcattggacgtgttgtatatggaacgattgaatgaaatttgggcatcttttctatcaattctttgtaaatcgtatccttcccggaagcactttttcccataatataaaatattttacccatactttttctcctgctcttaaacatgcatctggattcgtattctcaacttccagcctgtcggttctttattctggatttcccgcaactaataaacaattctcctggcttagcccttcaatggaaaaacccatctctttatattttaccatcttttgcacaatagtagaagtaattctctctccaggaacaatcattgggattcccggtggataaagatagacatattccaatgagattcttcctgatgcctcatcccatttcacactctcaccttccattctccctgcttcaaaggaagaatatgcttgttctaatggaatcatttcataagaaatattttttatagtatgatcctcatcattccctgaaagctcttcgcacagaatatttttatcaatctccatcactgcctgaaccaatctttccattccttcttgtgtatctcccggtcctgtcatagcaatcacataagacccggaagccatctccatctccaaatgataagatctcagcatttcctgaaatcgttttccattcaaaacttccccatctgtattcttaagattttttacagataatactatctttgaccggtcataatgttctgcctcaattaattttatattctttaactgcttcagtctctctcttgcttgctgcaaacactcaacataagtgtccatgatttcttctctgcactcatccattgcccggacacactcatcaatggatgccattaaaatatacgatgggctgctggattgaagcatatgcaaataatttcttatcctttcacgatcagcatatctcccatttatatgaagcaatgctgtctgagttaaagacggaagtgtcttgtgaagactgtggatcaccacatcagccccccgtgtattcgcattttgcggaaaatatgaatgaaatccaaaatgtgcaccatgcgcttcgtcaacaatcaggggaatcttatattcatgcacgatttccgcaattgcttcaatatccgacacaactccttcataagtcggtgaaacaatgacaaccgcctgaatatcttcatattcttcaagtaacttctttatctggtctacatggatctcaccattaagatctgtctcttccgaaaactccggataaatatatactgggcgtaattcatttatatataccgcattatataccgatttatgacaatttcttgccatcaagattctaccaccacgctccgtacatcccatcaccgcactcaaaagaccgactgtactcccattaaccaaataatgcgtctcttccgcttgaaatactctagctgcattctcctgtaattctttcaacagttcttctgcatgatgaagatcatcaaatccatctatctccgttatatcaatattatatggtaacctggctctcatgagctccatattacgcttatgtccaggcatatgaaatgcataataatctgaatttccatatgcagttaatttttcatataaatattccataataacctcttatttgtaaaaagaacctatctgaataatgatagattctcttgatgccatattttatttatataaagttaaaagcagtaatcataatagattactgctttctttcagtgagcgtgcggggattcgaaccccggacaacttgattaaaagtcaagtgctctaccacctgagctacacgcccttaaacactcgcagaagttataatatcataagtcttatataaatgcaagcacttttttcagattttaaatttaatatttaaatgcatctcgccacatcgcttcaggcgattctaaatggcgagacacaatcttattttctcaaatcatagaactttccgctcaaatttttcacctttacataagaaacatgatctataaacattctcgaagtaaataccgttttcccgtgatcacagaaaatctcaatactggaatgatctaccataacccggacaatctgtttcttctctaactgttttgcataacggattgttccaaacttctccgcatacacttcggtcataccacttctgtccagacaatattcttccccatctgcgctgaaagtcaaacagttaccatctttatttcctatttctatagaaaacgcactttctgtatttccttcaagctcaaaggaacattcttcaacctttatgtgctctgtaatgcttctttcatttgcacgaagttgctttagctcttctaccggctgttgaaccaacctttcttcctcgatccggatttctctcggaagtgtcaacatgtgagcccaattattcttatcagttggatattcgctcttagaatttccaagccatccaaataaaattcttcgatgtttttcgtcctcatacgactgaggcgcatagaaatcaaatcccttatcaagttcatacatttctgaaaattgaaattcttttcgttctgtatccaatggttttcctatcatgtaaactacggagaacacatttttataatcatatttattctcacttgaaattcccattggagaacagaacagcactcctttttgattctcttcataataatttggacattccaacatataacctaacattgcttcctgtccattctgaagtaatctcactcttccggcgtactcatatgaatctgcctgcttacctctatacaacatcagaattccttcatgttctttactttctgctcctgtcagcatccagtattcactgtcccttttccagacatatggatcacgataattcattgttgtctgattcggatccatctctacaatctttttccggtctgtcagtttctcaccatcaaatctggcataacaggtgcatgggatcatctcttcattttcaattcccgtatagaaaacctgtacctgttctccttcttttaatgccatgcctgtataacacccgaaagagtctgattctgtatccgggtacattgccaccccatgatcttcataatgaataaaatcttttgttgtcaaatgataccagtgtttcaacccatgtaccggtccggccggaaaccattggtaaaaaatatggtgtatcccattgatctcacacagcccattcggatcattcatcagaccacatttcggtgcaatgtgccataccggataatacgggtcattcctggttgtctcctgtatccgttgaaaatattcagccggcatatccgtaattcgaatatgccggttctgatgatttgaaaaatcatactgaaacataatttactcctttacactgcttctggattcttcttcataatcatccatgtacctgcaaatgcaactccaacagaaagaagtaatacaataatatactcaatcattcctccctgaagataaagcagcataccaggaatcatagacgctccggttcccttcgcacataagccaacgatcgctgcgaatccaccacctacagcacctccaagacatcccatgaagaatggcttaattcttgggaatgtaagaccatacataacaggttcggaaattccgaataatgccgggatcagagctggaatcatgttagctctcttctgcttattcttctgcatcatgacgattgcaagtcctgctccaagctgtcctgcgattgctgcagatcccatcgggttaatgtaatctacaccagtctctgtaaaaatacttacaatgatcggtgttactgtatgatgcatacctacagaacagagaatctgaatcagtcctccataagcgattcctccaattccaaatggaagtttcagcatcataaggatcagatctgtcattcctttttcaattcctgaaagaaccggtcctacaacaaagagtcctgccaaaagtgaaacaagtaaagtaaggaatggtacaagcagcatgtctaagatatccggaatcacctgatgtaacttcttctccagttttgctgcaaagaatcccatgaataatgcaggaattacagaactctgataacctgtaatatttaaatgcaacggtccaaagacaaaacttaacggatcagcaactccatttaccacatcccatttatttggaagagttggtgatacaagcatcagcccaagtacaataccgaggatcggtgagccaccgaacttcttgcatgcagaccatgcaactaatactgggataaatgtgtatgctgtgtctgttaatacagaaaatactgtatcaaaagatggtgataactcaattccaaatccatttacaagaagacttcttactcccatcagaatacctgttgcaagaagtaccggaatgataggaataaaaatatcagaaatcatctttgttgtaccctggaaagataatttttccttctccccattttctgttacttcagcatctccagctgtcactcctgccagtttctgaaactcagcacaaactttattcacaaatccagttccaagaatcacctgatgctggccactctttgagaaataacctgctactccctgaatctctttcatcccctcttcatcaataacagatgcatcctttacttccacgcgaagcctggttgcacaatgtgtcgcactgattacattttcttttccgccaaatgctttcagaatttcctgcgctgtctttacaggatcttttttcatctctcattacctcctatttgtgcgattataacatatatcgtttttatcaaatcgattcgatatgtttgttttttatagtggccttggaatatttcctatcggccactgttatttttgtttatcgaatcgtttcgatatctgttgattataatagatcattaccatttcgctgtcaatgaatttaatcaattctttttgttttctgtatttttcaacaaattaaagtcgtgatatttggtaaaaagtaacatgtaatttaacatgtttcaccactttggactgtcacgccaaaaatagattcaacttcttcaatttttttcccttcaatttgcgagatgatcatggacactaatttttgagccatttcttcaattggctgaacaatcgcagtcagaatttctggtccgatttttgtaatatacgttccatcaatcgcaactatgctgagatcctctggaacttttcttcctcgtaactgcgcttctctcatacaggcagctgcagccatatcaacaccaagaattccatccatatcattacatgtctcaaatgcacgagctgcagcatcctgatacttttcagtagtaaatgtattatatcccacagaaatatctacaacttcacaaccttttttctgaagtatttcgcggaataccttctccttttcatcctcatagttcttaatcgtatgagaacttacaagctgtacgactttctttctgttcttctccagaaaaagcgacgctgctttctctgcaacctgtctcttgtctacatgaacagtcggaatataatctgccaaataacaatcaattgttacgattggtctgtcaatcttaagatatctctccttcttcagtgaatgagctcccataatcacgccatccatagttctacgatccagcatctgaaggtaagcttcttctacatcttcacgcccagctgttccacaaaccagtgccttataccctctggaatacagttctttctctgcgtatttaataaacgtactgaaaaagggatgtgcgatatctggaacaataattcctacaattcctgatttttgcatcttcagattacggccaagctcgcttggaatataatttaattccttcattgctttttcaatttttttcctggtttcgtcagatacatatcctttattattacacacaagtgaaacagtgcttcttgatactccagctaattttgctacatctccaatgcttgccaaatcaatccctcccgattatcagatcataaatctacagttactattctgcattagagttctttctctaataataaaatatagaaaaaagactgcggtatacgcagtctttccgtttacataaaataaaaatgcccagaaccggaatcgaaccagtgacacgaggattttcagtcctctgctctaccaactgagctatctgggcatagactataaaagtctgagttgcgggagcaggatttgaacctgcgaccttcgggttatgagcccgacgagcttccagactgctccatcccgcgatattaaattaatttcccaaaagagaaaagccgatgatcggactcgaaccgataacctgctgattacaaatcagctgctctgccaattgagccacatcggcttataacctttcggttaatggatggaggtggattcgaaccaccgaagcaatttgcagcagatttacagtctgtcccctttggccactcgggaatccatccatgttaagtgggacctacagggctcgaacctgtgaccctctgcttgtaaggcagatgctctcccagctgagctaagatcccacataacgacccagaagagactcgaactctcgacctccgccgtgacagggcggcgctctaaccaactgagccactgggccattcttcaattttcagaaggctatgtaccttcaaaactacatacagtcaaaaccaacatcatcatccaaacctatcactgctttggttatgccctcgacctattagtaacagtcagctccatgtgttaccacacttccacctctgccctatctacctcgtcgtcttcaaggggtcttactaacttgacgttatgagatatctcatcttgaggggggcttcacgcttagatgccttcagcgtttatcccttcccggcttggctactctgctatgcctttggtaagacaacagatacaccagcggccagtccatcccggtcctctcgtactaaggacagctcctctcaaatatcttacgcccacgccggatagggaccgaactgtctcacgacgttctgaacccagctcgcgtaccgctttaatgggcgaacagcccaacccttgggacctacttcagccccaggatgcgatgagccgacatcgaggtgccaaaccactccgtcgatgtgaactcttgggagtgataagcctgttatccccagggtagcttttatccgttgagcgatggcaatcccactttataccaccggatcactaagtcctactttcgtacctgctccacccgtcggtgtcgcagtcaagctcccttctgcctttgcactcttcgaatggtttccaaccattctgagggaacctttgagcgcctccgataccctttcggaggcgaccgccccagtcaaactccccacctgacattgtcccccagccggatcacggctgctggttagaaacccagtactgcaagggtggtatcccaacattggctccatggcaactggcgttaccatttcctagcctcccacctatcctgtacatgcaataccgaatcccagtatcaagctggagtaaagctccatggggtctttccgtcctggcgcaggtaaccagcatcttcactggtatttcaatttcaccgggtgcattgttgagacagtgcccaaatcattacgcctttcgtgcgggtcggaacttacccgacaaggaatttcgctaccttaggaccgttatagttacggccgccgtttactggggcttaagttcaaagcttcgcttgcgctaacctctccccttaaccttccagcaccgggcaggcgtcagcccatatacctcacctttcggttttgcatagacctgtgtttttgctaaacagttgcttgggccaattctctgcggccatcttactggcactccttctcccgaagttacggagtcattttgccgagttccttaacaatgcttctcccgtcggccttaggattctctcctcatccacctgtgtcggtttacggtacgggtatcctgcaaacaatagcggcttttcttgacagtcagctcacgtgcttccctacttattttcagtccacatcacgtcttcagattaaagagcggatttgccaactcttctcctacctcgcttgtaccggtctttccattcccggctcacgctctctgcctgtgtccccacagttctgttacaggatagtacaggaatttcaacctgttatccatcgactacgtctttcgacctcgccttaggccccgacttacccagagcagatcagctttactctggaaaccttagatattcggccggaaggattcccaccttcctctcgctactcattccggcattctctcttcttaaaagtccacagctccttacggtactgcttcatccctttaagaatgctcctctaccaattgaattaattcaattccaaagcttcggcagtgtgttttagccccggacattttcggcgcaggacctctcgactagtgagctattacgcactctttgaatgaatggctgcttctgagccaacatcctagttgtcttcgaaatcccacatccttttccacttaacacacattttggggccttagctgttggtctgggctctttcccttttgaccacccaacttatctcggatcgtctgactcccatacatcatctacacggcattcggagtttgatatcccttagtaagctttgacgcccccttaggaattcagtgctctacctccgcaagactcgtatgaggctagccctaaagctatttcgaggagaaccagctatctccgggttcgattggaatttctcccctatccacacctcatccccacccttttcaacggatgtgggttcggtcctccattgccttttacggcaacttcaacctggacatggatagatcacccggtttcgggtctactccgactgactatgcgccctattcagacttggtttcccttcggctccggacctttagtccttaacctcgccagccagcgtaactcgccggaccgttctacaaaaagtacgcggttgagcatataaagctcttccacagcttgtaaacatatggtttcaggttctttttcactcccctcccggggtccttttcacctttccttcacagtactatgcgctatcggtcactaagtagtatttagccttacggggtggtccccgcatcttcccacaaggttccacgtgtctcgtggtactctggatcccgccatgtcaactcgtctttcgcttacggggctttcaccctctctggccggctttcccaaaaccgttctgctaaactcgttgaatcaattccgcggtccgaaccccagcatgcacgcacgctggtttgggctcttccgttttcgctcgccgctactcacagaatcacatgttgttttctcttcctccggctacttagatgtttcagttcaccgggttcccttccttaagttatgtattggcttaaggatacttgaggtttgctcaagtaggtttccccattcagaaatctccggatcaaaggatatttgctcctccccgaagcttttcgcagcttatcacgtctttcatcggctcttagtgccaaggcatccaccatacgctcttatcagcataaccaactcgacctcatcccacgggaatgggataatgtccacacatacatagcgttgtatgcgttggtgatagtcaatttgttttaagtctgttttcttcagactgtaagttaatgttgttaacattacctcggatgtcttgattagatatttatctaaatctattgatttttactatatgcagttttcaaggtacataactggtttctttcgaaaccaagtggagaatacgagagtcgaactcgtgacctcctgcttgcaaggcaggcgctctcccaactgagctaatcccccatgggtatgggcttaagtggactcgaaccaccgacctcacgcttatcaggcgtgcgctctaaccagctgagctataagcccatattcttttgtaatttggcggccacctactctcccacaccgtctccagtgcagtaccatcggccgcttaggtctttaccatcgtgttcgggatgggaacgggtgttacccctaagcgcatcgccaccaaaaattttaggttacttgataacccaacaatagacaacagtaaaacgctttacttctttcttccttagaaaggaggtgatccagccgcaccttccgatacggctaccttgttacgacttcaccccagttatcggtcccaccttcggcagctccctccttacggttgggtcactgacttcgggcgttactgactcccatggtgtgacgggcggtgtgtacaagacccgggaacgtattcaccgcgacattctgattcgcgattactagcgattccagcttcatgtagtcgagttgcagactacaatccgaactgagacgttatttttgggatttgctcgacctcgcggttctgcctccctttgtttacgccattgtagcacgtgtgtagccctgctcataaggggcatgatgatttgacgtcatccccaccttcctccaggttatccctggcagtctctctagagtgcccggcctgaccgctggctactaaagataggggttgcgctcgttgcgggacttaacccaacatctcacgacacgagctgacgacaaccatgcaccacctgtcatccctgtcccgaaggaaaggcaacattacttgccggtcagggagatgtcaagagcaggtaaggttcttcgcgttgcttcgaattaaaccacatgctccaccgcttgtgcgggtccccgtcaattcctttgagtttcattcttgcgaacgtactccccaggtggactacttattgcgtttgctgcggcaccgaacagctttgctgcccgacacctagtagtcatcgtttacggcgtggactaccagggtatctaatcctgtttgctccccacgctttcgagcctcaacgtcagttaccgtccagtaagccgccttcgccactggtgttcctcctaatatctacgcatttcaccgctacactaggaattccgcttacctctccggtactctagattgacagtttccaatgcagtcccggggttgagccccgggttttcacatcagacttgccactccgtctacgctccctttacacccagtaaatccggataacgcttgcaccatacgtattaccgcggctgctggcacgtatttagccggtgcttcttagtcaggtaccgtcattttcttccctgctgatagagctttacataccgaaatacttcatcgctcacgcggcgtcgctgcatcagggtttcccccattgtgcaatattccccactgctgcctcccgtaggagtttgggccgtgtctcagtcccaatgtggccggtcaccctctcaggtcggctactgatcgtcggcttggtaggccgttaccccaccaactacctaatcagacgcgggtccatctcataccaccggagtttttacccctgcaccatgcggtgctgtggtcttatgcggtattagcagtcatttctaactgttatccccctgtatgaggcaggttacccacgcgttactcacccgtccgccactcagtcaccaagatcttcatccgaagaatcaaatcaaggtgcttcgttcgacttgcatgtgttaagcacgccgccagcgttcatcctgagccaggatcaaactctcgttaaaagtgtttgtatccagttcagaatcaactaactagctaattcttccctttttactgttgttttggtttgtttaaaaaccgttcttaaaaatcttctcttaaagaaattttcaagggttgttgttgtctattgttcagttatcaaggttcttacttcgctttgttcatttgcgacagctcatttattttatcataagcatttcgctttgtcaagaacttttttgaagttttttatttttcttacctcttcgctttatttcagcgaatcagctcatttatattatcatgtatttttcagaaagtcaagaacttttttgaagtttttttattttctttttacatgatctttaactttcttcaaaatcaggagaagtcgccaaacttctgtcatcccgctcttttgatttaagttaaacggagaaagagggatttgaaccctcgcgccggtcacccgacctacacccttagcaggggcgcctcttcagcctcttgagtatttctccgtacactgaattctactatagaatctatagctttgttcaattgtgtgcaccaacagtgcgaaatttattatagcaatacactgtcatcttgtcaatcactttttttcattttttaacaaaattttaaactatctgttctacgcagcttttcagctttgcagttgctgtctcaatatccttttgggcaaagattgcactgatcactgcaacaccattaattccactacccgaaagctcttttacattatcttgtgtaattcctcctatagcaacaaccggaatatcaactttagtacagatttccttcaacacactgtgttctacttcccatgcgtctgtttttgttcctgtttgaaacaccgctccaactcccagataatctgccccatgcttttcagctaataaggcctgctctactgtccgtgcagagacgcctatgattttatcttctcccaactgcgctcttacatcaagagcttccatatcactttgcccaacatgcactccatccgcatcaatttccttcgcaagcttcacattatcattaattatgaatggaactctatattttttgcataactgttgtatcttttttgcctcttctaaaaactcttcttctgtcaaatctttttcacgtaactgaataaaggtagcgccacctttcagcgcttcctcaacctgttcataaagcgtctgcccattcagccaatgtctgtccgtaacagcatacagcaacatctgttcccttaattgttccttagtaaagctcatacttagcccctttctccagtttttctcctgtcatattatagatggcatcaataattctgtttctatatgtagcgttaccatcgccttcctgcattctcatccatgctatttcaccggcaacgcccatcatacaaactgctgccacagcagcttccagttttcttttcggatttgctgccagaaaagcggtcgtaataccggataactgacatcccgtgccagttattcttcccatttctgaacgtccatttctaattacataacatttctcaccatctgtcacaagatctattgctcctgtaattataacaattgcttctttctttttcgcaaaacctttaataaatgatatgctctgttgcaaatttctttcattaacggcttctgtaagatcagcatctacgccttttgtacttccgcttccataagccagcgtcttaatttctgaaacattacctcgaatcacagaaaactttatctcttttattaattttaatgccgtctccgtcctgaacctgcttgctcctgctcccaccggatctaataataccggatgtcccagttcattagagcgatgcccggctttaagcattccctcaatactcgttttatgtaatgttcccaaattaatgttcagccctccacatatagatgtaatgtccgctacatcttccggctcatctgacataattggactgccaccacatgcaagaatcacattcgcaacatcattcactgttacataatttgttatgttatgcaccactggggctttttttctaacttgatccaagcattcctttagcatttctcttctaccttttctttcgtcaggttcttattgattgtttcctggatctgctgttctactgcagcagcaatttccacggtcttcatatctttataatcttcataaagcatcggtttcagaaaatgcacctgcaccgtcaccggtcgggtactgtttgtatcaaacggtttaaaagaatcaacaagtgctaccggaataatcgggcactttgctttggttgctgctttaaagcttccccctttaaaagaaccgacattattcccattttttgaacgcgttccttctgggaaaataagataatttctccccgatacaacttcttttgttacacttgtaatagttttcattgcctgacggacatcctcacgatcaatcataaatgctttcatgattttaaatacctgttttaaaaacggaacgttttccacttcttttttagctacaacagaaaaagggtgcgtacacgcttcaacaattgccaatacatcatacaaaccttgatgatttggaaaaaacataaatccatcctgctttggaatattctcctgtccatgtacatcgattgttacatttccgcctttatttgcacgaaaaacaatccaacgcaaaaattcataattatcttcttctgtatatttatccacatgtgaagcccgatagcagagtttaatccatccccccggcacgatcaacagattccgcaataccatcagtagaattcttctcatgcattctcctccattctgtaataatccttaattgctgtttcataaagattattcccatctttatctattactacaatcaccggaaaattttcaactgtcagttttctgatcgcttctgttccaagatcgtcatacgctaccacttctgaagatgtgatacattttgaaagaagcgcccccgctccaccaacagccgcaaaatatactgaaccattgcgtacaattgcatcaattaccgcctgatttctttttccttttcctatcatagcaccaagcccaagatccaggagctgaggtgcgtatttatccattctgcttgctgtcgtcggtcctgccgagccaattgggcgtccttctcttgccggtgatggtcccatgtaataaatcacctgaccttgaatatcaattggaagttccccgccttcctgtaaaatctcatacattcttttatgcgctgcatctcttgctgtatagaccgttcctgtaagataaacataatctcctgccttcagtgttgccacggtctctttcttcattggtactgttatatgcttgtccatttcactttcctctttcacttagcctgttgaattaaattgtacgaatcacatgacgatttacatgacagcaaatattaaccgccaccggaagtcccgcgatatgtgttggataagtattaatattcaccgcaagtgctgttgttgtccctccaagtccaccaggtccgataccaaggctatttatttttgtaaggagttcttcttccaactcttttacgtattcaatttctgaatgtgatccgacttcacgtgtcagagcttctttggccatcaaagcgcatttttcaaatgtaccaccaattccaacaccaaccaccattggcgggcacgcattcggtccggcatcttttaccgcagtaagaaccgcatcttttacaccttcaattccttctgccggtttcagcataaatacacgactcatattctcgcttccgaaacctttcggtgctacttttatctttacctggtctccatctacaattcttgtatgcaaaactgccggagtgttatcctttgtattctcacggatcaacggatctccaacgactgatttacgaagataaccttctacataaccttgacgtacgccttcatttaccgcatcttccaatgctcctccttcaagatgaacatcctggccaatctcaagaaacactaccgccattcctgtatcctggcaaatcggaatcatatcctctcctgcaatcttcaaattctcttgcaactgttccaatatctgttttccaagtggtgcttcctcattcttttcggcacatttcattgcctctgccatatctggtgacagaaaatgatttgcttcaatgcacatttctttgatgttttttgttatttcttctacacgtattgtccgaatcatttcttctatctcccttttctttgaaacaggtacgcaagcgcaatgcaagcgtacctgtatttttatatctcaaattcaatttttctgcctgttcgatggtactggtgatatctcactcctgctgcatccatcattcgttttgatgcttttactcccgctgtatccgcgtatttgtcacaatcataaataacttctttaattcctgcctgaataattgcttttgcgcattcattgcacggaaaaagagatacgtaaagttttgctcccgcaagacttccgccattataattcagaattgcattcaattcactatgcgttgtatatacatattttgtctctaacggatcttcgccttcgcgcgcccatgggaattcatcatcagaacatcccatcggaagaccattatatcccatggaaagaatcttattatcctgacttacaatacaacacccaacctgtgtattcgggtcttttgatcgcattccggaaagcattgccacgcccataaaatattcatcccatgataaataatctgttcttttatctgacattattcttctccttttgcatatgaattcagtttgtctgcaagtttatctataagtcctgtcagtatctcaaaacattctccataagctgtcaggggttttccataaggattcggaagttcttctgatactccaacaaattcatttattgtatatacattttttacattttcataatccgaaagaactttgttcttaattatctcattcaatgtcaatacaagtgtatctccttgtagattgctgccatcaaactgctttgacacatgattttccaacgtcatctgagcactcttcataattgcctctgccttctggtttaccggttcagggaaaagcacaaccagtccgccggattcaataatatactcttgctcaagatcctggtgacatagtaattctgccgccattggtcctactgccgaatccgcctcgctgacaaaaatcactcttcgatacttctgcttctttgtgatctctgttgcctgcaggtgcatatgtcctgccgccttttcaagacgattcataatcgcctttcctattccgttcatagcaaaagattcactataaatcagatcaacgtcttcttcatcgaattcacgaagcactcgataaaggtttcttgcaatagtattctcattctcacgggttcctatattcttcacaatcccataattatagaactgaactgtttcccccgttgcaatgattccgacttcctttccttcccgatgcgcggcataagcaagctgacgaattgcaagaatctcttctcttatatttccttccacaatcatcattttcgccttcggtgcataatgtcggtacttcattcccggagctttcggcgcctgcttgctttcactgttaaccaatgtctcatcaacaccaaccggtccgattacctcctcaaacatatccgctgtaattgcacccggacgtaaaatcatcggcggctctaccgtcatgtcaagaattgtggattccaatccgatatctaccgcacctccatccaggatcatatcaatcttaccttccagatccacccgcacatgctctgctgtcgtcggactcggacgcccggatgtattcgcactcggtgctgaaacaaatccacctgccgcccggatcaatgccgctgcaattggatcacttggcatacgaaccgcaaccgtatctaatcctccggttgtcccgtaaggtacactctcacttttttcaaatatcatcgtcagcggacctggccaaaaatgtgctgccagtgcgtctgtctccggtggaatattcaccgccacttttttcaaatcctcatagtctgcaatatgaacaatcaacggattatctgatggacgtccttttgctgcatatgttttctttgccgcctcctcttttaatgcgtccgccccaagtccgtaaaccgtctccgtaggaaatgcaacaagacctccttgttttaatacatttcccgcttcttctattacatcctggtttatttggtttttatctatttttctaataatcgtttccataaattttattatatcattatttgttctaaaaaaaaactgtttctcttctactattcattttcttttatataagacaaaattccttctgccactgcttctgctactgatttctgataatcttccgtaaccagcttctgtgcttctttatagttactcaaaaaaccacattctacgatcactgtaggtacttccgtcttttttaatatataatatgtattatttgcttttatctttttggtattatcaggatttaccttttgtaaagcgtcctgtattatccccgcagctttttctccttccgtcgatgtctgatagtagaagacctgcgcaccgaaaacattttcttcatgataactgttctgatgtatactgactgctaatataggagaaacttcattcataatctttactctgtatttcaaatcttctactttactttgtgcaagctgttcatctgtttctctggtcatgattacctgtatattttctttttccaaaattttctttacagaattcgtaatcgttaaattgatatctttttctttcactccattgattccgaccttccctgaatcagtgccaccatgtcctgcatctaaaacaactatcctgtctgacttttctgcttctccgattgtctccatttcttcttttaattctttctgtaagtttttcgaaactttccaacaacctgcgataagccctgtcataatcagaatccctatcatcaacctgatttttctttgcaaaaaaacgacctcccttcacatattctatctatatgcaatgagaagccgttttttaacttatcttttatttaatttacatactgagaaatgagcttccatacactgctttcttcttttcccagactccattctgccacacctgccagtttattttcctgtatcaccttcagctttgcttccaatgattgagcatcttcaagccagatacggtaggttccgccatccgcagaccattttgcatagttttgctgtgtcttttcatcccactgtgctgttgctcccgcattcacaacactctgcgctgcttcttccattcccagtgccttacttgatactttattcggataagatgctgcttctgtaccagcttcttccgaaagttgctccgggctctttgctgtctcaaaccataatctggtaaaaaatggaattccggcaattactttatcagctgatacctttttcaatgttttttctattccatcctgtaaatagctgatcgatgccactgatcccgcttcataggatccttctgtatgttcatcataagccataatcaccacgtaatctgccacaatcccctgctctttaagatcataatgtgaattgtatgactgtggcacataattatcaactgaaaatacaagattattctggtggcacttcacagacagctctctcacaagctgcacgtaatgcacaccacacttggaagaaatcaattcaaagtctaaattaattccatccactcctgctgccactgccgcagctacaacctgatcttccagttttgctctttttgatgtataacgcaatgtctcataggtctcatcataggaattcgttccaccatgaaaatcccggaatacagcccacacttccagtcctgccgtatgtgcataattcacatagtccgcatctgcaattgaactgatattaccttccgtatccgcaagactaaaccaggttggtgcgatcgtcgtaagtccactggttgatgcaagtacctgctgaaccgcattatttgctgccgcattcgtcacattatgccatgccatattaatcgaatgatcttctgtcatgtctgaataaaccggttccgtaaaatctctggatattttttcttttttctggttctttaaagatttggtcttaatatatcctacataaccatccgctgtggcaactttcatccagtcatcttcgtcttcaagcactgtcaccttgtccgattttttaacttctgtcagtatcggactcttaacgccaccaagataacgaacctgtgtgtctttcttcacttctgctgtctcgatctcgccccactttgatgtgataattgctctgtttggttcctgttccacagaatattccatattcgtatactcttgtatgaacggaagtgcgatatatgcgatatctccatccgtcttaagaattacataatcttcactttttgtttcgttcactgctgtatattcactgctgttctcacttacagaaacatttccatccggcaaggtatataaaagcacccgttcgttcgcatcccagtaaaatctgctgtttatcttatcacgaagaacctgatatgctacataatattgtccatcaaaaaccttacccggtataacactatctgtagaagaatcggaagaagattccgcggaactctcttcttttttcactacttcattattaatgatcaatgccagatcatcactgttttctattccataatattgttctttatcggcttcctcatttgatgaaccgtatctcttaaagaaaactgcgcctgctgccaaaatcatgatcaataatatgatgatcattacgaaaagaattttgttacgtcttttccgcgctctattcactttcttcgcacgtcgtgttcctgaccttccatttctgcctctacctgttgtcattggtcttccctttctccgggaactccccggatgtccagattgtccttctactcttcccctgcttcgcgcatgggtactgccttttcttttgtccatgccaaccctcctgattgcaatttttatatctctggcgctttcttacacaaacagttccttacgctctgctgtgtgtatttctaatatctccacatctctggataaaataatgattctggaattcattatatcatattttcatcttgcgtcattaacaaattgcatctacaacagttgtacatatcaaaaagttgttacaccttaaatgtctgtccatcttctatcaattataacagcttacaaatatacttctgtccggcagttcaaggggtaatctctgcctgtctgttatgattcacatctgtaaaaaccaatgattctatccttccttccggatcaatcacataatctctcatataagtaccttcttctctggccatatatgctgtcacaatctgcaatggactcatcggatatccatccataactatgtccactcctttttcttcataacctcttagttccgcatataattccttatatccatcttccgttctcatatcgtatgtactccttctctcctgggatcctgataaaacgttgtccgccatcctcgaccataaaaggtatctgtgacatactgtagaacaagtgacggacaagaagacaaccctgatcttcggagggtctccttctcataattattgtgaattttcccttgatttcagggaattgaatttttttgaaaatcagaaatgctttcagtgcctcctttcttaacattctgttttatcaaatggtgtgtcttctgtaagtgccattatatgagcagccttttggaatttcaatgtgtttattgttgataagtgggtgggatttgttgataacctaaaatagttataaacaattttcgttttcctttacatcttttctttttttgtttatactaaacgatgaaaagatatatctagttatgaacataatgaacagttcttaatccacagattatcttaatatcataagacataaggatgtgatcatatgaaaattgaaaaaatcaatgacaatcagattcgttgtactttgacacatgccgatcttgcagcccgcaatctcaagatcagcgaactggcttatggtaccgagaaagcaaaatcactatttcgagatatgatgcagcaggcatctttcgactttggattcgagacagatgaccttcctctgatgatagaagcaattccttcttcttcagactctatcaccttgatcataacaaaggtggaggatccggaagaacttgatacacgtttttccaagtttacacctgccggagattctgatacactgaacagcaatgttcttgaaaagcttcagggcgcagatgaattctttgatctgcttaacaaagtgaaggaagtggcttccgaagcaaaagatccggaacctaaagaaacagtaccgacatttccggtccgcctgttctccttcgacacattagattccgtaattgaggcttcccgcctgcttgctccgttctatacaggtgcaaatacattatataaggacgaggagaataataatacctttatccttgcgctggcacctgctgatggcgcagatcaggaatttaataaagtatgtaatatgctttcggagtacagttcccctgagaagggagattcttctgttcttgcatttctggaggagcattgcaaaatcattgtttccgcagacgcaattcagaagttatccacaatttaaacaacgaataaaaaagacggtctggaattatgggaataacttttcccacacttcaggccgtctttttcacttgttatccacaaaaacttttaacgatacgaacaaagaatgtgccttgcacattcttgcgcctgcggcgttgctaagcgccagtggcgcttgtttagcaaggaccgaagtggaaacgtagaccgcttgcgacatctacattgtacgccgcagtgcgcatccttagcggagcgttttttatatattaggaaagcactttcctaatatataaaaaagctgccatactctctttttgagagtacaacagcttcttgtatatcttttctcttaattatttaccagcggctgccattgctgcattgatcttctctacaagcagatctgcatcaattccatgaaccatagctgcttcctcaagagactccatctgagatgacgggcatccaagacaatgcataccaatctccatcaaaatcggagctgactctggaaatgttaccagaagttcgccaattgttgtgcttttagaaattgccatcactgtttcctccttacatatttctattttcaattaatttctgtcacccttgaacagtaatttttattataatccctgatctatgatttagcaaccttattttcattatcattccatgaaattttctgaaattttcacacaactttttccgtttatcacactactcaaaagtcaatcagttttcttttttttttcgacaaatcgtcattttcataacaataaccaaaacgaatgttctttttatttccaaaagttatccacactattcacatctttctttgttgataatgtggataactttcaggaaatcttttatttttcctcattttttcgatttttcaatgttgataagttgaaaactactttttttcatttttttgctattttgaatattcttgtcatattttgtgcattttgactatccatatatttttcttggaaaataccgattttagaatttacagtcaaatctttcatttcccatacatattctggacaatacattgttttctttctattattctttaataaatccgtctgacagccacgatatttgtatacgttgcactgctgataccaattccctgatcttcgttcattgcatttacaatctgatcatttcctatatataaaccaacatgtccttcatataagataagatcccccggctgtgcgtcttcataactcacttcatatcccgcacttcgctgttcataagaagttcgtggaagacttataccaaaatgtgcatacacagactggacaaatcccgaacaatctgctccatctgttaaacttgtaccgccccacacatatggattcccaataaactgacaggcataatcaataacttcctgccctgacgcaactgactgagccgccgcttctgcagcctgggcttctgcttccgcctccgcagccgcagcttcttctgcttccattcgtttttgttcttcctcttttgtctccccgtaagaataagaactttcctctgtaacataatcaccgcacacccagccattaacttcaccgacctgtatcggataccagccatctacaggatctgctgtcacaagatattcttctccctgaccgatctgggttaatacggtagtatctgtcccatgtccttctctgacattcagacaatctgctgtgactgtaacattctcatttgtatactcatctgacctcgaacgggcttcttctcctgtgaacaatgtttccgtcggaacatacccctctgcatttcccgaccggatctttgtccatccatccagatattccaacacaactgccgctgaatcagaatataattttccaacccattcactgttttcatctgcttcgtttctaatataggtataatcccccgtattagaaaacgctatattcaaatactctccctcttctgtcggcaccagatacagattgatattgttctttatttctgtctgatatgatgcttccaaaatgttttcaattcctgtaaccggaaccagactcttctcactgtcatcagtttctgccgcctgtgttctgactacactccccggaattatgatcatccctgccatcattgacatgataagcttatgcttcatccgcatgttactcatataaaacctcctttatttccagccttatcttttgtgggaagttttaattgttacataattgttaatttttgttacgccgtaattttatcaatcaaccatagatgtgtcaactgttttaatagttttttcataattatcgccctccactatttttaatcattcccctttttattaattttaacgccctttttgttaatcattctgtaatattttgtcgaaccaaatagaaaaacttatttttttctcttgacaattttaaaaatataagttatattctaattacagtaatcgttatcgttattgattcaattttagaaagaggtgaatctatggctgcaattaaatatagccgacaacgagaagctatcaagcattatctcgcttcaacaaaagagcatcccactgccgacactgtttatctgcatgtcaaagaggattttcctaatatcagtcttggtactgtttaccggaatttgaatctgctgacagatatcggcgaagcgatcaagatccctacacctgacggcggagatcgatttgacgggaatgttattccccacaatcattttctctgtacaagctgtggacggttactggatctggaactggatatgaagagtattgaagaagtgaaccggctggccggggagaatttcgatggaatcatcacttcaagttccactttgttttatggggaatgcagtgactgcattaggaagtcttaagttaaaaaaaaaattaataagaaaaaggagattatcattatgaaaaaatttgtatgtacagtatgtggttatgttcacgaaggagatgctgcaccggctgaatgtccagtctgtcacgcaccagcttccaagtttaaagagcaggaaggagacaaagtatgggctgctgagcacgttgtaggcgttgcacagggtgtcagcgaagatattcttgcagatcttcgtgcaaacttcgcaggagaatgctctgaagtaggaatgtaccttgcaatggcaagagttgctcacagagaaggatatccggaaatcggactttactgggaaaaagctgcttacgaagaagcagagcatgctgcaaaattcgctgaacttcttggtgaagttgtaacagacagcacaaagaaaaaccttgagatgagagttgatgctgagcacggtgctacagaaggtaaattcgatcttgcaaagagagctaaagctgctaacctggatgcaatccacgacacagtacacgagatggctcgcgacgaagctagacacggaaaagcattcgaaggactgcttaagagatacttcggctaatttaaacaaaccttatcagcagaagcgatcgcttctgctatgataaaactgcccatcgggaatggaacattcccggtgggcagttttttaatcttctttctcttttctttcatctgataatttaacttttttgccggcaatgagtttctgtttctcttttctccctaactgcttaattgcatattcccgtttcattgcctgttcttttgtctcaaattcctcataataagccaattcaacaggcctccgtgccttcgtatattttgcgcctttcccggaattgtgcgcctccacacgtttttccagatcatttgtccagcccgtgtataacgttccgtcactacattttagcatatatgtataattcaaaaactcatcacctctgctatctcccgcattactctttcgatgcatgttatttattatatcatgaatcccttatccaagaccaatactatattatcaggaaaacttctcttaaactttttcctgtatccaatacaatatagtatagtattggtcctgcacccgtaatcaaacttctgattccatctttttatccagacaaatacaactttactccataaaattcattgggtcaaccggctctccgtctttcataatttcaaaatagagattcggtccttcgacactataatatttcgtcggtgaattcagtgttcccacttcttctcctgctgcgatataatctccgactgctgccgctacttcatccagctggccataaaccgcagtatacccatttcccatatcgagtgtcacagtagttcctgtctgagcagtcagatcaatactctctaccactcctgctgccgccgcgtggatcacttctccctgcgttccaccaataatcagtgcaggattgtatttatactgctccaatgtcggaaaatatactgtatgatccatactaaaactcaaaagtgttgctccgcttgccggccaggcaagtgtgctttcctgagtaaaccacacattctgtgtatttgaagatgctgtgctttgaatttcctctgtggatgtatttccattctccatactgttttcattctcttgctgaacatccttttgggattcctggttttcttcattatcctcttctgaatctgtgtctgtaggaagaatatcatctgtattcgccggtgtactatcatcttctgtaagctgttctgctgttgtttgcgcatcttttatctgctgctccatgtcttttttgtaatgattgtatgtgtagcttccaaccattgtaattaccgcaacaaaacaaagtactgcgccaactgcagctccctttcctttcaaaaaggccggtctttcatttttattcataatcatcacctctggctatagcattgcctgaaatgattgttcttattcatctagatggtgtagttctgttccttcataaaaatattgcaggatctcttcataatttttcccatcctttgccatttcctgtgcagtccactgactcattccgaatccgtgcccttttccaacagttgcaatcttcaacccgtgtggactttcataaaaagaaaatgaactcgaaggaagtttcagtgcatcacggaactgatctcctgtacatatcgtctctccaatcctcatttttctgacataaccggaagaatcccattcctgaatttcaaaatcttcgtatccatacccattttctgcttttttctgttcctctgccacaaggaattctctacatctcttttgtatctctttatattctatcaaatgtacctgaatttcatcttctgccgccttgtcaagcggacattcttttgctgtgatgtacggataatctgcattcccaagtacctcctgcacatctctggtctttccattactggattgatgaaacggtgcccatgcaaaggtctcatgataccacagtacaattccttttgtttcctgtgctgcctgttgacatttttccaaattctcttcgtattttgtcccccactttttcttcatctgagtctgcgtcagacatttatccaaaagagtctgcttttctttctctgttctgtacaattctgtacgtagaacaaccacctgtgccttcaatgcttctatttcacatccaccatctgtttctcctgcgagcatttctgcgagatacacagatgcattatcgctgtcagctccctgcaccgcattttttccgtttataaaaacagaaatgatgtaaggaagtaaaaacagtatgataagaaatgcaaaaaatgactttattttatttctaattgtatcacgcataaaaacagccctccatactctattgtatggaaggctgtcctattttagaacttatctggttcattctccgtgtaattgcttattcgaaaaggtcctgtcctgatggaacttcaaccttctccagatgccagatatcacgcacatactcctcgattgttctgtcagatgtgaacttaccgctgcatgctgtgttcatcattgccatcttagaccatctctgctgatctctgtaagcttcttctactctcttctgtgcatctgcataagaacggaagtctttcagaatgaagtaagtatctgctttgtctgtacactgtgtattcagcagtgagttatacaggttgatatacatgttgtgatcaccgttagaatatgttccatccatcagctgatctacgacacgtttgatctcccaatcattaaagtaaacatctgttgggttgtaaccgccattgttctcgtaattgattacttcctgtgaactcagaccgaagataaatgcattctcttctccaacttcatgaacgatctctacatttgctccgtccattgttccgagtgtcggtgcaccgttcaacatgaacttcatgttacctgtaccggatgcctctttggaagctgttgaaatctgttcgctgacatctgccgctgcgaaaagaatctctgcattggatactctgtagtcttcgataaatacaactttcagctttccgttgatgcttctgtcgttatttacaacatctgctacggagttgatcagtttgattgtctctttcgcacgaaggtatcctgctgctgccttagctccgaagataaatgttcttgggtagaaggacatctccggatgctctttgatctgattgtacagatacatgatatgcaggatatttaacagctgacgtttgtactcatgcagacgttttacctgaatgtcaaagatagagcgaggatctacatcgattccgttatgctctttgatatatttcgcaaggcgaactttattctggtatttaatttccataaattcacgtcttgcgtcttcgtcttcaacaagtggtttcagctttgcaatctgagacagatctgtgatccatccatcaccgatcttatctgtgatccaatccgcaagaagtgggtttccatgtgcgaggaaacgtctctgtgtgattccatttgtcttattgttgaatttctcaggcatcatctgatagaaatctttcagttcctgtttctcaaggatctctgtatgaagctgtgcaacaccatttacagagaatcctgcaacgattgccatgttagccatacgaacctgtccgttcataaggattgccattttgcggactttctcttcatttcccggatacatttcgcgaaccttaatcaggaaacgacgatcgatctcctgtacaatctggtaaatacgtggaagcagtttagagaacaggtcgattggccatttctcaagtgcctctgccatgattgtatggtttgtataagcacaagtcttacttgtaacttcccatgcatcctcccagcttaatccttctacgtcgatgaggagacgcattaattctggaactgcaactgtcgggtgagtatcgttcatctggataacaaccttctcatgcagttttctgatatcaccatgttttttcttatacttctcgatcagagcctgaagacttgcagaaataaagaaatactgctgtttcagacgaagctcttttcctgagtaatggttatcgttcggatagagaacatcaacgatcagttttgcaaggttttcctgctctactgctttgtgataatttcctctgtcaaattcatcaagtttaaagtctgtgatcggttttgcatcccatacacgcagtgtatttactacgtgattgccatatccaacgattggcatatcatacggaactgccatgacagactcatagttttcctggataaatttatcttttcctgtaacaggatctttctcgaaacggatatttccgccaaaacgtacttcttttgcgtactcttcacggcgaatctcaaacggatttccttctttcagccagttgtccggaacctctacctgatatccatctttgattttctgtttgaacattccgtaacgataacggattccacatccatatgccgggtaattcagtgtagcgagagaatcaaggaaacatgctgcaagacgtccaagacctccattaccaagagccgcatccggctcctggtcttcaatcacgttcagatcaatattcatctcttccagtgcttcttttacttctttatatgctgtcatattgatgaggttgttgccaagtgcacgtcccataaggaactccattgacatatagtatactgtcttagcgtctgtctcatcatatcttttttgtgtctcaatccaatcatcgataatcacatctttgactgcataggatactgcctggaataactgctgcggcgtagcctcatcgattgtctttctgtaaagtgtcttaacgttatcctttactgccgctttaaacgcttttttctcgaatcttttactgaacatgtttattactctccttttttctcaacccccattgtaactgcttcgccgttgatcttccattctttcacgtaaccatccggctgtgcttttacaacttcatcagcaagtacctcacctgcgatcagtgtgttgttcttttcgaagacagcttctgccttttcactaccctcgtatgtaactttgattctgtccataacttcgaaatcagcttcttttctcattgtctggatcttgctgatgatctcacgtacaaatccctcttccagcagctctggtgacaggtttgtatcgagaacaactgtgattccgttgtcatttacagattcatatccttcaatctgtgctgtatcaatcagaagatcttccttgaagagttcaatctcctgtccgtttacatccagtttgagtgcacctgtagcgttgagctcatccattgctgcatttccatcgatgtcgttaagcgccgctttgataccacctaacatcttaccatatttcggtccgactgtctttaattgtggtttaaaactataagaagtaaagtctcttacatcatctgtaaatttaacatttttaacattcagctcgtctgcaacgatctcctgatagaattctggaagatcaaagtctgctttcacaaacatctttccgatcggctgacggttcttgatgttggacgcattacggcatgcacgtcccataacaacaaggtcaagaacatgttccatgttattttcaagttctttgtcaatctgatcttcatgaacttctgggaagtcacaaaggtgaatactttccggagcatccttatcaatgctgcgaaccaggttctgataaatctcttctgtcatgaacgggatcatcggagctgctgccttagatactgtaacaagagctgtgtacagagtcatgtaagcattgatcttatcctgctccattccctttgcccagaaacgctcacggcttcttcttacataccagttactcagatcatctacgaaatcctgaagcacacgtgctgcctctgggattctgtaattgccaagattataatctacatcttttaccattgtgttcatcttggagaggatccacttatccataaccggaagtttatcatattccagagtatattttgttgcatcaaaattatcaatgttcgcataaagcacgaagaatgcataagtattccaaagtgttcccatgaacttacgctgtccttcctgaacggcttttccgtggaaacgattcggaagccacggagcactgttgatgtagaaataccagcggatcgcatctgcaccgtatttctccagtgcatcaaacggatcaacggcatttcctttagacttactcatcttctgtccattttcatcctgaacatgtccaagaacgataacattcttatatggagccttgttgaacagcagtgttgagattgcaagcagagagtagaaccatcctcttgtctggtctacagcctcggaaataaagtctgccgggaactgtctttcaaacagatcctgattttcaaatggataatgatgctgtgcaaatggcattgatccactgtcgaaccagcagtcgataacttccggtactctgtgcatctctttaccacactccggacacttgattgttacagcatcaatgtatgggcggtgaagctcgatatcatccggacagttatcagacattgatttcagttcttcaatgcttccgatagagtgcatatgtccacactcacactgccagatattcagtggtgttccccagtaacggttacggctgattccccagtcctgaacgttctcgatccagtcaccgaaacgtcctttaccgatactttccggaatccagttgattgtgttattatttctgatcaggtcttcgcgaactgctgtcatcttgatgaaccaggactcacgtgcatagtagatcagtggagtatcacatctccagcagtgaggatagctatgctcgaacttcggtgcatcataaagaagtcctcttgcatccagatcctttaatacttccggatcagccttcttcacaaacagaccggcgaacggtgtagattctgccatatcacccttctcatctacaagctgtacgaatggaagatcatattttcttcctacattcgcatcatcttcaccaaatgctggtgcgatatgaacgactcctgtaccatctgtcagagttacgtactcatcacatacaacatagaatgctttcttgcgctgttttgctgcctcgtctgctgcacactgatacagcggctcatactcttttccttccagatcagttcccttgtaagtctcaagaatttcataagcatctttgccttcttctgcaagtcttccaagaactgtgtcaagcagtgcgcaagccatataatatacatgtccgtctgctgccttaacctttgcgtaatcttctttcggatttacacaaagtgcaaggttggatggaagtgtccaaggtgttgttgtccatgcaagaatatatgcatcttcatcttttactttaaaacgaacgattgctgaacgctccttaacatccttgtatccctgtgcaacttcctgtgcggaaagcggtgttccacaacgcgggcagtaaggaacgatcttaaatcctttgtaaaggagtcccttatcccagatctgcttcagagcccaccattcagactcaataaagttgttatcataagttacatatgggtgctccatatcagcccagaatccaactgtaccggagaaattctcccacattcctttgtatttccatacactctctttacatttcttgataaatggttcaagaccatatttctcaatctgatcttttccatcaagaccaagaagcttctcaacttcaagctctaccggaagaccatgtgtatcccatccggcctttcttggaaccatatatcctttcattgtacggtatctcgggatcatatccttaataacacgagttaaaacgtgtccgatatgcggtttaccatttgctgtcggaggtccgtcatagaaaatataatccggacatccttctttttcatccatacttttctggaagatttcattatcatcccagaacttttcaacttctttttcacggctgacaaagttcatgtcagttaaaactttcttatacatgttcttatcctttcctgagtttattttatgattcttaaaaaaagaaaggcttccgtcctgtaataggacgaaagcctgaacttctctcgttaaaccacctgttacatcatacttaggcctgatttctgacctgcatatggtatcctttaacgccggacacgcgtcagtccttactctctctttctgcagaaacctcttttctgcatctgtttcaggaactgctgctctggagtgatcttcaaaaatctcttacttgcaccggactcccaccatctccggctcgctgtaacgttcggataaatcctactgtctccgtcatcgctttacctgtgaacttctacacacggcttattataaagagattcttggctctagtcaaggtttattatgataaaaaaagtgcgaaaaaacgttgttttcagcgttctttcgcaaatttctgttttcttatctgcggcgtttcttctttcttttcacattaccactctttgcatttcttctttttcctttttttcttctgcgacgtcttatctgcttccggtaattcgcaagtacaacaatgataatcaataaaatcacaactgcaatcacaactccgatcacaattttcataaactttgaaatcccggttacgacagttgaagttgtcttatctttcttttttcccaaaacagctgcactgctttcctctgttttttctatcgcagctttcacactgcctacttcctgccctttataagtaaatgttactgttccggatccatccttgttgctgtcttccttcacttctgctttcacatcagaaaattgtgcactcttcggaagtacgatataagcatcttcgtcttcataagacttcacaccttccggaagcttctgatccttcaaagatatttttgaaaaattactgtaagcataatcaaacatggcacgagtatctatataagcatcatttccaaaatcataaagtacaaccgcaacaagctgcatatctccgttatctgccattgtcacaagcgttgttcttgcctgatctgtgtagccggtcttaccgcccttgcagtattcatagtaattatcattctgtggccagagcatcttgtgcttctgctgaaaagtacgttcttcattcaccagattcgttgccggaatcgtatggcttaacgattgggaaattgtccggaacgcttccttctgataaactgctgcaccaattcttgccatatcatgcgccgttgtataatgttgttcatcatgaagtccgttcgcattcatccagtgtgaacctgtacatccaagtttttctgactcatcattcatcgcctgaataaatgtgtcataacccccacccatcttcttgccaacactctcagctactgcataagagacctcatttgccgatgccagaagaacggcatagagcgcgtcttccatactgatctgctcccccggtgtcatgccgatatgggcatcgccatattccagaaaggagatactgtcctgggaaaattctaccgtatctgtaagctctgcattgtccaacgcaaccaatgttgtcagaagttttgtaatactcgccggataatgcttcttttcaatctgcttgctatataaaactgccccactgttcatatccataacgattgcagagtccgcataagttgccggtccctgtggccagttctccacactgtttgaatccggtgcgatcgcataacagttctgacgctgtgtctccctgtcttcttccgctgtctgagttgaatctgttgtggctgccgctgtttcttcctcagcaaatgtctgtactggtggcatcaatatcatagatgccgccaggaaaagagacagacagcactttccgtatctcttaaaatttatcataaaggatatcctccgcttgtttgaattcataacgcaaaaatccccacagacctttcatctgtggggaatctgtgactattgttattataattctactaaaagtttttttcaatagtccggaggctcttttctttatctaatctcttccatcacaatctctgcccccgcagcttctactacaaggctgtctttctgtggatagaaccgtgtggtgaacacatactcgccattattcacaaacacttccactgaagacttatccacaagaatttcaacatttgaaattttatctacatcaacataacgtattcctcttcctgcagatacagaatttttatcctgacttgtgaaatgcatctcgaatcttccatttttgtactcaagaatcaattcttcatcaatcactgtcctgaattcattattctgaatgcccgagatattcacatcatagactttatatccatcttttttcaacattcctgtagacttatccacaaaagttttcctcttttgcaattctctgaccggtctctgacaaactttgccgtcttctacaaacacttctctcgggaaagtgaagcagtgctgccacccttctgcgatcgtcagattagtatattcttcacaatccggcattcccatccagctgatgtgaacccttcttccatcttcagtctcaaaactctgcggtgcatagaaatcaaatccgtaatcccaaagcatgtattctgaaagtttataatcatctaaaatatttccatcaaccatgaaatatcctgactgataaacatttctgtcatcccatactccgccttcaagtccctgcacagaagcagaaagaatttttgttccatctacctcaaagtaatccgggcattcccacatataaccaaacggtttctttgattccacacggcttctgaacttccagttaatcttatcttttgactcgaagatcaatgcctgtccgacatcttcttttgtacgtgcaccctgaatcatgtagtatgtatctccgtctttccacaccttcggatcacgcacatggcaagtcagatctgacgggtaatccacatttctcatcagttctttttttgatccaaatgtctttccatcctcactgacaacaagaaccgtatttgactcacgtcctgtgttgatatagtcaaaatctccgtcttccagctttacattgcctgtatagtaaacatacattttgtcatcttcgataaatgctgatccggagtatacaccatgacagtcaaatggctgatccggatataactttactccctggtattcccagtcgatcatatctttgcttgtatagtgcccccacatcttcacgccgccttcggcattaaatggagaatactgaaaaaatgcatgatagatcccattcaactggcacagtccgttcggatcgttgagccagccaacaggaggcatcagatgcagcttttcacgataagctgtgccttctttctgctctttttctttcatcatctcttccgtcatatctaccagtttgatcagatcccttgttaatgcattcatgctcttgtctccctttttccatttacagccgttctattctgcaagaattcttctttgaataaaacggctgtatctttttaatcactgttcaatttatttctcaatcttcattgcgagatcagctgttgtaactgttcccgctgctgtcttctctactttgctgaagtcatctgcattcgtcagtatcatcatcgtagttgccggatgtcctgctgctttgatagcatccagatctgcttcgatcagcacatcgcccttacgaacctttgctccgtctgctactttctttacaaatccttttccatccatggaaactgtatcaattccaatgtggatcagaagctctgctcctgcttccgttgcaatgcatactgcatgccctgtatcgaagatattcattacttcaccgtcacatggtgctacaatctttccatctgttggctcaactgcaacagttgttccaagcatctctgatgcaaatgtctcatctgctacttctgctgtcgcaacaacatttccgtttaccgggcttgtaatttcttctgctgaaacattttctgcttctactacattctctgtctcttctgttttctcaactgttgtctctgttgcggctgtcttaactaccggatctttatctttgtaaatcatgaaggagatcacaaatgctactcctactgaaattgccatctcgataatgtactgaagcggctgattcaggcaaagcaggataccgaagatacctgttactccagttccttttgctccgagatgtacaagtgatgcatacaatgctccgcatcctccaccaatacatcctgcgataaatggtttgaagaatcttaagtttacaccaaagattgccggctctgtgattcccataaatgcactaagtgatgacggaagtgcaagggatttaatcttctgatcttttgacttaacgccaactgccaatgctgctgcaccctgtgctacatttgctgcacttgcaagtggaagccagtaagttactccgtattttgccagctgaccaatatcgattgctgtgtacatctgatgaatacctgttactactgtcggtgcatacaaacctcccatgatcagacttccaagtccgagcggaagtgtcagcatccactggattgctccaagaatcgcattctcaccccatacgaagatcggtcctacgatagaaagtgtaagatatcctgtcacgaatacgctgacaagtggtgttacaaacaggtcaagtgctgccggaactaccttgtgcagcttcttttctaatacagaaaggatccatactgcaataataaccgggattacatgtccctggtatccaaccatgtcgatgtgatacagtccgaagaatacgctctgtgtctgctgtacaccttccgttgcaaccgtataagcgttctgcaatgacggatgaatcataatcataccgataacggctccaagatactggtttgcaccaaatgctttcgcagctgaaaatgcaatcagaatctgcagaaatgtataagcgatattactgaacagattcgcaaacacataaatagaactgcttgtatcaattgctaaaaatccatttgcattcatgaaatccagcgcattcatgattcccatcaggaaaccacttgctacgatggccggaatgatcggtacaaaaatatcacctaacagcttgatggccttcataaaccagttctgcttctctgccgctgcttcctttgcctcagcttttgtgcttgctgtaatacctgcgatcgcgataaattcatcaaacaccttattcactgttcctgttccaagaataatctgaagctgtccagatgcctcaaatactccctttactccatccacattctctattgcctctttatctgccttactattatctgcgataacaagacgaagacgcgttgcgcagtgcgctgcggatacaatattcttacttccacctacatatcccagaatctcctgggctgttttcctgtaatccatgattactctcccttccttctatgttttatgtgtaatcgttttcacatcttatgattttatattaaataaaaaaatgccatttgtaaagatggcatttttactaattctgattcttctgttttgtttaacttgcactatactcttagttacattcattcaaatctattcacgatctggaatcccagcttcatatgcaccggcaccggatttttctcttcaatctgttcaagtaagagctctgcccccttgattccactcgttttatacccaaaatgaaccgttggaataccgcctgtcacagcccttaacatctgattatcaccaaatcctgtgacacagataccagactgttccaaaatgtgtagcatccttgcaccagaattctgaaccgattccggaaccgcctttttactctgtgcgatcaatgcctcgattgctcctgctgcaatcgtatctgttgcgcacgatatgatatcgattccattttcttcactcaacaaatccactgctgcttcatatccgctgctcattgtaaattctgattcgcgtctgtaccgatggtcatcgaaagtaatccctgcttcctgaagtcccttgcggaacccgtcttctctggcagcacctgctgccttatcttcacgagtaacaccaatatatgcaatcttgcaatcttcaggtcttccaccattccgcttcagtgctttcaccgcaacttcttgtcccattgctcttcccgcaccaaaatcatcatgatagatacagcttgccatttctgtctcctgtcccacaaccacaaccggaacctttgattcttttaaaaatctccgatgctcgtctgtaagcactgtaccgatcagtacaattccatctaccggataactttcaaagattctcagataagtcagctcattctttggctgattatccgtgcttgcaagaagcatctggtaccctcttgccgaaagaacctgttcaattcccgctgtgatccggctgattgattctgaattgatcttcggagccaccacaccaaccagatgtgcacgtccggttcttaggattcttgcctgagtagacggctgatatcccgtcttctcaatcactttacggatctgctcctttttctgttcactcacatatccgtcattcaaatatcttgatactgctgcgctggacaccccggccatctgcgcaatctcttttatcgtcattgtatactgcctgcctttatttccctgattttcgaaattatccagatccattttcgctctttttctagctttgacctgaacctgaatgacattcacattttaacattcaacagacaaatatgcaacgacgttgcgctacatcattctttatctacctgttactgttcacacgatgtgcgaccagcaacgcatctcgccattttaaatcgcctttggcgatggggcgagatgcattcaagtcaaaacacgcatcctccgtgtcaatcagcggagtgattgacacgggagtgaacagtaatatcatataaaaatccataaagtattactcttccattcgtctgatcgttagaacaagtagataagccaatgatcctgttccacccctcttttccttttttctcaggaagacgatactgcacggcatgtgcctttatatattccatcagttcttccagattctctttcttatactcttgtggattataaataacttcatcatacgcatccgtctccacacaggcgaaccactggattttttctgactgttcattcaaatatagcgtacctgttttgtgcgattcaaaatactccttttctttataattcatcacatccccaaacattgcgccattatccatatggtgaccatataataaactgtaactgtcaataaattttctgtcatttctgctatccagaaaaatacttcctgaaagagcaaactctccataaatatcctgattgatatattccagatttgtttctccctgcacaaccgggtaatcaatctttgttccgtctaccgtcagccaggcacacacatccggattgattttctgaagttcctgcagggacggactttcatccgttttccctgcaggtttatatttcatcaattctccactgataaacgcacgtcggttgatctggcaggtatcccataatgaatatgcaccataaagaagcataagaataataaagagcgctgccagaatttccaatatcttatttcccgcttctataactttaaaaaacagctcttccctctgctcccctgcctcctgaccttctgtcgtttcgtttatcatgctctttttctacgaaagaaaactgatccaaatgcgcctgccgcacccacaagtaatacgtatggtgtgtatttctttgcaacgcctgttactacagccgcatctttctcattcacatactgaactactgtaccatcttcttttgtagttcctgtctttgttccggtcgcagttgtttctccatcaatcgtagtagtatatccatctttattcgcatcggtctctgttaccgtgtatttatcagattctgtcaatccataaattgtaattgaacctgtatcagaaatctgataagaagtttctgcttcattgcttgtgatgtattctgtaagtgcctgtgcatttgcatttttcttcactacaactttgtagagttctccctgtccaccattcaccgcaaccttgaattcgaaggatttatttttaactccctgattacctgtgatcgtttttttgatcgtcacatcatgcgttgtatcattttctgcaccataatcattgataaattcaagatcacctttttcaccattattttctgtaattacatttccaacataaagtgctccatctgctccgttatatacaaaaagataaacatctctgcctgctgtatcataatcgattccttcataagagcctgcatcttcagtcacaacataatgataaacaccagcatgttcaaatacctctgtattaatttccaatgttgcattcttgctgtaagctgctgccagtgtatcttctcctgatggctggaatccgattgtctgagaggccgtgattccacctgtcactccggcatatactacattatctctccaattttctgctgcttcaccattctccacatgaaacgaaaatgatgtatttggctggtatgtatttccatccgttgtcaccgttttcttcaaattcagctgtgtgattggctcattttcctcggctgacgcatttaccacacaaactgacatcatcatcatactcgccattgccattgctgaaatacgtcctgctgttttcttattcataatctctacctcactttttactctgatttccgggtttcagatatctgaccggcggagcaccgtaattactctgccttttatctccttgtccttcacagctccaaaataccgactgtcttttgcatttccccgttgatctcccagaataaaatattctccgctattcagcgtcagtggatagaccgtgtcactttcgtattgcggtgtatcatagaaaatatcattttccacaatcttacttccattgatctttaccttttcgtcctctgtaatctctactgtatcgccgccggctgcgatcactctgcccacatatttctctcctgctttctgaagaaccaccacatccccgcttttcggtttttccagtcgataataaaagagcagatctcccgcactgatgcgtggcgacatgtcattgtttttcatggttgtaatcccaaacaacagcccgaataaaacccacagaaacaccagaagaaatgcaagacgaatcagaaaaagatgaatctctccttttaatttcatgaatctttttctttcctctttcttcgaagaaacagaaaaactgctcctcctgttatacctgctgtttccatcaggattgtaggaaacatcctgttctctactcctgtcggaacaaccataagcggttgatactgattcgtataagttactgttgccgtctgctccttcgttacatcaattcgtgctgtcatcccctctgcctgactttcctgtcccacgagataaaaggtatgctccagcctatagttattctgttcctgagcaatctccgtcactgtatattccccaggttcaaccgcctggagcgatgcactccactgaccattttgcggaatctgcacttcttcgatcacttcttctccccgttttatctgaaatgtaaaggactcgtccggaatctgacttgctgcaattccttccacctgctttgtgattatcagattacctgttttggccggtgggtttggaagatcctttccaaaagaaatgttatcgagcaggtttccatttgacagatttccatttgctgccgctactgccacaaaataaaatcgagtaacatattgccctgccggaactgtataatctccatagtgataagtccatttcccagttttatctgacaataccgcctgcacatcaggattactctgatcaaatccagatcctgccggattccaatcagaactcattgatttcgtatcactgatgataaccgccatcgtgtctgttccccagcgtccggcatgttccaatccccagtgaagaactgtccctggttctgtcaaaacatcctgataaagagcccctggttcctcacagtttaattctgcgaactgatttccctgtgccgcactgctgatgttataaaccggttttggatcattaaccgtatttccataataacttcggcttccatctgcaatctcgatataataatctctctgagttccagagccaaaatatgcacctttcgctgttgttttccaatataaatcattcgttccatttgctacctggataaaatgtgcattcttataagtcagtgttcctgcatcacatacttttggcgtctcaaaacttccattctgaagcttgtcataataattcaccttgtattcggaagaataaactgtcaccgcttcatttactgtcactttcacacgaaatgtcttctgtgcaccatctcttgcaacttcataggattgctttctactatccacagtcgctgtatcctcaatgtctttccattgaccattttcacttacctgccactgataagcaatctgatctgattctgttgttccactaacctctgctgtcagagaaccttttgtaagaatctcatctttaagagcaactgaaattttctctgaatcggtacttttcccttcctctgttactactccagactcagggggagattcttttgcgtctggtttctgcatttctgatcgggaagtctcttccgcatctgtttcttccgggagcacggtacaatctgttccctctgtggtttgtacagcctcaacttgtacaccttctgccagtacctgaacacccatcaacgacagcatcatcagtaccgccatcagaaatgcaagatgtcttcttaactttcttcgcatcttaccctctcctgtcttaaattgaattgttacctttcagaaagtgctgttgatatattttatatcagccctcctgtctaatatatgtatgtctctggatttctgattatgacttgaaagagataaaattagatttctttaagattttttacattttttaaaattttctcttgcaaagaccatttaaatatgataatatatttttcgtcgataagacaaggaaatattcctccttagctcagtcggtagagcattcggctgttaaccgaagtgtcgttggttcaagtccaacagggggagttatgaagaacatctcacagatttcgcgctgtgggatgtttttttgttgcgtatccctagcggagcgttttttgtatattaggaaaggactttcctaatatacaaaaaaacggactgtgcaatgcacaatccgtaatcttagtggagaatacgagagtcgaactcgtgacctcctgcttgcaaggcaggcgctctcccaactgagctaatcccccatatttatgtcctcaacagaacttctatatgatatcatagcttatcgagagtgtcaaccctatttttaatatttttcttttatttttcctaccggaatccaagtaaccagatcaacagcggattatggttgtacaaaaacgtcaagatcgcgctctgctcaaccatcgcataacacgttgttccaatctctgtcgtataaatcagagtcagcacaaggaatgcgatccatacgataataaatcccagaccaattccaagcactcctcccgccagatgattgatcgcaccaagtaacggaagttcaccaataatattcaccgcatacatcaatgcgcttacaagaatgattgcaatcaaaaatgtcacaagaaatgacacaacattgaggatcattcgtgaaatataggccgcaacatattctgggaaagttgtaacatccagttcttcataaatcgcagtattattattttccagcaatgcatctttcaaaaactgtggcagcattgaattctcaatctcacggatctgtgtatcctttggaagatctccgaccactttcaggatatcctgtgcagttatccccagtttgtcccatccagattcgcttaatgatttaatctggtctaccgttaaattctccagaggtgttccactgagattcgctttcaacagatcatctgctgaaatctctggcataaatgcttccactatcttcttctccagtacgtcctgcgccggtgtatgcttcatcagcgcatccgacacgtatggggaaaggaatgacaccagtaccagtgtcaatattgttgacagaagggataaaccaattctgagaaatcccttcacaaagccggcaatcatacagactaaaaacacaatcccgactgcaagtaacaaccaattctccatatatctctcctattttgtcaaataaacaattcgcagttcattatcactcatcacatagtatctgttcaggccaaatgcatcaaagatttcctgcgcatctgctcccaggtctcccttaaacttcaggattcctgtcgttgtataaatacagcacttacttccatcatacagaatgatattgtctccatccatctttacatgactataatctccctgtatttctctactgaacacagtatctcctgattgattatacattctcaactcataccctgacttctcctgattaagcaggacaaatccaaaataagaatccgaatggaaaacactttttatctcttgattcactttcacttcttttatctgctttggagtatcttttcctgtataaatctcaaatccattatctccaactgcaacagatctgtcatttcccataaagaaaatctcgccgatcagcatatcttcataagtatctgctgtcactttgttatctgccttctctttgccggcagcatcaaaattataatatccgatcctgctctgcacctgtgttcctttggtataaagataagaaactgccaaaacctttccatcatcagacaaatccaatgcgatcggatatcctgtatttccaattgtaatctgctgctctaccagaatatttcctgctgcatcataagatataatcttcggtgaagtctcatctttcaaaattgcactgacaattccctgattcgatactgcgattctctcaatcggtaatgtcgtctgaatctcacctttcaacccattttttgtaaatacgagaatgctgttgcctccgctgtcagcaactgcaaacacatcgtctttcacaacaatcaccggtgtctgaagctgtgttggctgaatccacttttcctcattcttcttattcagaaataccacaccgtcatgattataacgcacaattccatctgcaaactgaacgtaattattcctgtccgaaaggtctttcgcgtaactgtctgccttgcggactgtgccataagtcttactatctaaaaggaggtatgttccgcagattgccatcgcaatcaggatgatataggtaagaagttcttttcttctccggcgtttgatccttctttccctttgtctcagcgcttttctatcatcctgcgtttttaccacctgtaaattcgacattttctttcgcgccatattgctccccttatcgtttgtcccgtgtacctttttctgttggtacacatttcgctttcacttgtctttcacagtataacacggatttatggcaatatcaatttttgtccgatatagatcaggttcccattctgcaatccattcatcctgctgatcgcatctacatgattaacatctccatacatttttttactgataattgcaagggtatctcctttttccaccacataaataccatcattttcatctgctgcaacggcagtcccggaaactggaacactttctgtattcttatcttccgtctgttcttccccttcattttcttccgttatctctgcggattccttttctgtatctgctgcttcctgatttttctccacagtagatgctgctccactcgtctctttcacatcaggtgaggatgtttgcttttccccctcggcaaccacatttatcttattctggagggatttcattttactgaaattattcatcatagaaacacccatcacgatcaggaccagtacaagacatgtactgattccatacatcagactgcctgtccttctttctcttttctgaccgccccgttcacgtaccagagaacgaaagctttgtgcagccgtatcttccacattttctgtctgaactgccccatttttttttcgacttgcaatcatataattctgcatgcacggattcttctcgtaataagtataatgtcctccaatttccatcagatctcccagcttatgtacaaaaaatacatcttcctggtttgtcgaatctttcataacaagaacggtatttttctttggaaataattttttatgcagctttacgttgatagaacccggagccagctgtaaatcatgctctgtcacaaaccagcctatgatttctccttcttcaaaatactggctgcattcttcacaaccacatttccatatcttgtcattgatcaggtattcaccgccctccttttttaactcttttatttttatcgcaccataaatataaatatattcttcattatcctgcttctgtatttcaccaatcagaaaggctccttctggttgtttttctttctcgcttttttcacttaactgaagaaaaaaagtatctacataatcttccacatagatttttggactatcactcacgtttcctatctgacgcacatttttcggaatctgtctctccattttatactcacctttctatcacttttatttaatttcccggggattgcccttaacatagcacaaggaaatcgggagattttatcaattagtgtcaggtaagttcgacaaatattacttttcgtgcacggcattttcttaatatttccaaacatcaaaaaacgctccggtactctctgattgcagatattctgtaaacagaaagcgcgaagcgttctttttattagattattgtaactgttcagagccaacctccaaaatgctacgcatttcgtcggtgtggcgtatccgccaaataaaatttcaaaaacagtcttaaaaatgcaagcattttacacctgttttatgaaattttgcttggctctgaacagttacagattattttgcaaatgctttgatcttctcgtagatgctgtctgtatcaagaccatacttcttcagaagctcaagtgccggaccagactcaccgaatgtatcattcacaccgatcttcataacctgtgtcggagctttctctgaaagtacatcacatacagcacttccaagtccgccgataacggaatgctcttcaactgtaacaacttttcctgtctcttttgcagctgctacaacaagttcctcatcgagaggtttgatcgtatgaatgttgatcactttcgcatcaattccatctgctgcaagcttctcagctgcttccagacagttacttacaggaagtcctgttgcgatgatcgtcaggtcttttccttctcttaacacaacaccttttccaagctcaaacttgtagtccggtctgtcattgatcaccggcactgcgagacgtccaaatctcagatataccggtccctgatgctcgtaagcagcacgtacagctgctcttgcctctacatcatcagctgggttgattacaaccattcccggaattgtacgcatcaaagcgatatcctcattacactgatgtgttgctccatcttctcctacagagattccggcatgtgttgcaccaatctttacattcaggtgtggatatccaacagagtttcttacctgctcaaatgcacgtcctgctgcgaacattgcgaaagaacttgcaaatggcacttttcctgttgttgcaagacctgctgcaacaccgatcatattagactcagcaataccacaatcgataaaacgatccggatgtgctttcttgaatacacctgtctttgtagctgctgccagatcggcatcaagtactacaacgttatcatgttctgttccgagttcagccaaagcattaccgtagctgtctcttgttgcgatcttctttacttctgacataatgcttcacctgctttctctaattcttccattgcaatcttgtactcttcatcgttcggagcttttccgtgccatcctacctggttctccatgaaggatacaccttttccttttactgtcttagcaataatagctgtcggctgtcctttgactgtctttgcttctttgaatgcagcatcgatctgatcaaagtcatttccatcaatattgattacatggaaattaaatgcctcaaacttcttatcgatcgggtacggagagttgacttctgtaattgctccgtcaatctgaagattgttattatcaacgataacaacgagattatccagttttctatgtgctgccagcatggaagcctcccatacctgaccttcctgaatctcaccgtctccgagcagtgtgtatactctgtagtctgcattgtcaagctttcctgcgattgccatacctacagctgctgaaattccctgtccaagagatcctgaagacatatcaacacctggaatgtgtttcatgtccggatgtccctgcagataagatcctgtatgacgaagtgtcacgagatcttccttcgggaagaatcctttctgcgcaagtgtagaatacaatcccggagctgtgtgtcctttagaaagaacgaaacgatcgcgatccgctttctttggatctttcgggtctacgttcatctcttcaaaataaaggtatgtaaaaatctctgttgctgagagagatccacctggatgtccggcctttgcgctatgcagtgctgttacaatccctttccggatctcattcgcagttttcataagctctaacttgttcatgatatctcctttttaatttccattctgattccattttcagtcttaacgttatttcccggattactcaccaaaaacagcaatataatcctttttaaacttctcgatacctgcatctgtcagtgggtgatgtgtcatctgctcgattaccttataaggtactgttgcaatatctgctcctgccagtgcacattctgttacatggattggattacgtacacttgctgcgataatctctgtctcaattcctgctacttcgaacatctctacaatctctgcaatgaggtcaactccctttgtagaaatgtcatccagacgtccaaggaacggagaaacataagtagctcctgctcttgctgcaagaagtgcctggtttgctgtgaagatcagagttacatttgtcttgattccctctgctgtaagaaccttaacagccttcaggccttctactgtcatagggatcttaactaccatgttcggatggatctttgcaatctcacgtccttctgcgatcatgccttctgcatctgttgttgtagccttaacctctccactgatcggtccgtctacgatagatgcgatctcagcgataacttcttcaaaaacacgtccttcttttgcgatcagagacgggtttgttgtaactccgcagatcactcccatgtcatttgctttcttgatatcctctacattagccgtgtcgataaaaaatttcatttttaagtcctcctatacatgaatcttcctcttaccactgatacaactcactgtttttccagcagtaattcgtttgtttatgagctgattatatagcttccaaaacctgaggtcaactgtctgaaaaattattaatagtcatttttcacttaataatccgacatattaaccgtttttattaatattagttaatatcaatcgtttttattctgtataaaaatctttattttaaaggctttatcaacattttctaaaatcagaatcgtttgtttttgttgtttttattagtaataattttattattttttattaatttgtaactgttcagagccaagcaaaatttcaaaaaaaggtataaaatgcttgcattttttagactgtttttgaaattttatttggcggatacgccacacctccgaaatgcgtagcattttggaggttggctctgaacagttacattaatttttaaataatccagcgtctatacatcaactattttgtcttcgcataagacgttgttccacgaaccacgatctgtggctcatattccacatgataaatactgaccggttcaaattctgtatacttccagtcccttgaactgatctttttcatgatgatatcacaggcatccattcctttgtgaactacaaaatgctcgatcgttgtaagtgacactttcttaactttggaaaataaagtattatcacatcccataaccgagacatctccgggaactttatacttcatatcctgaagtgcatccataatcccaaatgcgatcatatcattcagccccacgattgcagtgagatctttttctgtccggagcagttcttttgtcagatcatatccgatgcggtactctgaatcgattcccggaacattccggtcaaattcttcatctgcttcttttacaatcacctgatcgccatatccggcttttctgaattcatcaagaaaaccttctacccggcggaatctctgcttctgtcttgcagttaatggcggtgtaatgtatgccacatgctgatgccccagctccagaagatgtctgcccattaatcttccaagctttgtattgtccaactctactgcatctacatccaaatgcttctcctgattattgatcacaacaaccggaatcctttcagacatttctttgagctgtccgagaaagcatttccccggattgcacatatagataattccctgtgcattcagagtcgagatcattttcagataacgctcttccagttttaaatccctctgtgtattacagacaaagattccgaacccctgctctgttgcccttgattcaattccttgcaaaagcattacatagtacgggtttgtcaggttcgggctgatgacaacgagcagtttttctcgtcgctctccacgctgtgttctgcgtttcggaagttcataccccagttctcccgccgctgcctccactttctggattacttcttttgaaaaagagacgttatacttcttattgagtaccatcgagaccgttgcctgtgaaactcccgcgcgctttgccacatctgaagatgtaacttttttcttcgccatagccagtccctcctgccggtgtctcaaatgcttttacaattctgttcttccttccaatgcccggagcagtgttacctcatcaatgtattccagatcaccaccaaccggaacaccactggcaatcctgctcaccttgattccgaccggtttgataagtttactgatatacattgctgttgtctcgccttccagactagaattcgtcgcaatgatcacttcatccacatctccctgcagacgctccatcaattctttcagacggatatccccgggaccgattccaagcattggagaaattgctccatgaagtacatgatagactccattgtactttccggtcttctcataagctgccagatcacgcggtgtctccactaccatgatcgtcttatgatctctgtccggattgctgcagattgggcagatctccttatccgtcaacgtacagcactccttacaataacggacattcttgcgggcatctacgattgcattcgcaagtccttctacctgctctaccggcatattgatcacatgaaatgcaagtctttgtgctgatttattcccgattcccggaagtctcgagaactcctcgatcagacggctgatctgattactgtagtaatccattagaacattccgcctccaagaccgccaaatccgcctgtcatcttagatactgctgcatttgtctcctgctcaacctgacgcagtgcttcatttgtcgctgctacgatcaggtcttccagcatctcaatgtcgtccggatctacaacttcttctgcaagttttacttttgttacttctcttttgccggatacagttacttctactgctccgccgcctgcagctgctgtgaactcttttgtctcaagttctttctgttgctcttccatctgacgctgcatcttctgtgcctgcttcatcagattcgccatatttcccggcattccgccgcctggaaatcctccacgctttgccatgtctaatcctccactgttatttccatatttattttctgttctatgtccacaaatgtatcctcaaagtgtctgccctcttctacatgacggacatctacctcgactttctttccaatcttctcttcaatgagctgttcaagttcctgcacatgatcttctctgccaaccatatctgccgacatagcatctggcagtacaatcagcaaacgattatcaccaccaagactcagtcttgcttttttaagaaagcctctgatcatacctgacgcttcatctgcgatagaacggaaattcttcaccacttcctgcacatcctccggaattgcattcggcagctccggtttcgccttcctgcttcccacaacgcctgatccggatgatgacgcatcatctccattcaagtaaacaactcgctgcggcatatctgcggctgcagcaagtcctttctctactttgtcttctaccgcacggattctgtccagaagtgcatcctgaccagtctccatcgccggagtacaaagcttgatcagtgcaacttccagaagcactctcttctgcgtcgcatacttcagctgaccggaaagttctgagaatatacggatataacgcaacagcatatcaagttcgatcatctttgattcttccttgagctgcagcatattttccgtagacacatccagcacgtcctctatattatcagaagttttaaccaaaagcaaatttctcagataccatgtaaaatctgcggccagctgggtcagttcacgtccctgcataaccagatcttccacgatatcaagaactccggcaacatctctttccaatactttccgaagcaggcggctgaacacatccgtatccaccgcaccaagtacttcaagcacatgatcatacgtcaacttctgtcccagataaaatgcaatacactgatccagcagactgagtgcatcacgcatagatccgtctgccgcctttgcgatatagcgaagtgctttttcttccacttctacctgttctgtctgcatcagatcacgcatacggtctgtaattgtctcaatgctgattctcttgaaatcatagtgctgacatctggaaagaatcgtaattgggattttatgcacttctgtcgtcgccagaataaaaataacatactccggcggctcctcaagtgtcttaagcaatgcattaaatgctccgatggaaagcatatgcacctcgtcgataatgtatactttatacttaccttctgtcggtcgatatgtcacttcctcccggatctcacggatattatcaacaccattgttcgatgcagcatcgatctcgatcacattcattgaagtaccggcagcgatagatttacacatctcacactctccgcatggacttccatttaccgggtgctcacagtttactgccttcgcaaatattttcgcaaccgttgtcttaccggttcctcgcgttccgcaaaacagatacgcatgtccgatcctgttcgccttaatctggttctgaagcgttgtaacaatatgatcctgtccttttacatcttcgaattcagaaggacggaactttctgtatagcgccgtatatgacatgaattacacctcgtctccgaagctgataccgattgttctcgcttctttgatcagaccacagttcggatcaacatatttcagctttcctgcaacctcttccaacggaactttcactgtctcaccatttctcatggctaccatatatccgtattcttcattcaggatcaattctgctgccttcgctccgactcttgttgcaaatacacggtcataagcacaaggtgtgccacccctctgtgtatgtccaggaactgtgatacgaacttccttgtctgtctctttttcaatctgttctgccagttcgtaagcgatagaaggatattttctgtttgccagcttctctttgtattctttctttttcagttttgcatcttctttggaaatcgcaccctctgcaacagcaaggattgtaaatctcttacctgcctgtgtacgtttgtcgatcacattcttgattgctttaatatcatatgggatctccggaagaagaattatgtctgctccgcctgcaattccggcatgcagagttacatgacctactttgtgacccataacctcgataataaatacacggctgtgggaagttgctgtcgtatggattctgtcaatcgtatctgttgcgatatcaactgcactctggaatccaaatgtcatgtctgttccccacagatcgttatcgatcgtcttcggcagtgtcactacattgagtccttcctcacgaagaagatttgctgtcttatgagttccatttcctccaagaataacgagacaatccagatgaagcttatgatatgtgtgcttcattgcctccaccttgtctattccatccttatccggcacacgcatcagtttgaacggctgacgggatgtaccaagaattgttccaccctgtgtcaggattcccgagaaatcccttgatgtcaacatattgaaatccgaatagatcagacctttgtatccatctttaaatccatagatttctacatctttgcgcttgttgcaaattccttttacaacaccgcgcattgctgcgttaagtgcctggcagtctccaccactggtcagcattcctattcttaacatggcaactcctcctattactctttgtacctgttttaatcagttactttcttttcttgtttataagccctaaaaaagcagttggtttttctttccctgccgccattcctgatattccatgaccggcggctaccaactgctttttattataccttatttacaaatgctgctcaagaaattttagttttcgttatgttaaaaattcttccaatatctgacgaatcgccgcttctctttctgcatttcttcctgaatctctatctaagtctctctctgaatttcctgccggattccttgccggctctaccgttcttggttccccctcgatattgatcggcagctccgtcctctctgcttttgttttatttccattctgtacgttgtcttctctgtgaatctctctttcccctttcttttcttcccactcctgctttccggtattctctgcagcgatcacattcaattcttctctatccgtagtccgctgtctctttacgtgaaatgcacaattattctcaagataatccaccatatacatcctgacagcattaagcttgtactgttcgtccgaaagatgactgataacaaaaaggagtaccatctccgctaatcctgtttctatatattgatacgccgcatctgaaaatccataagtaatataacattcgaatgcaccaagagctgcaagaattccaacaaaccacaccgtcagcaattccatctgtctccaggtatgaatcccaaacaaaaatcctctatattcataaatatatttctccacaaatgcatttgtattctctacactgtcatgcaccatacatgcatgttcgtattttgctcttacgagttttatcagtcggtgtgtactcttggacatattccctgccgccttcagcatctgattcaatgtctgctgattcactgcttttgccagcactccgatcatgcccagaagcgccatcagataatagatgactctcgtgttcactgccagttctcttaacatagcaacccctcctggttttaaaaatattgcgcaactgttcgggcctccccttcgttacgtttgtagatattataaacctgattttatattctgtccgcataaatcgttctacagatttctacagcaaaagtcaaaattgtcgtattgaggaaaatcatgatgaaagatgtgaaaagaaaaattgtttttttatatttgatttgctataattcaaaaggtaactaaaagatctaaaatttcaaaagaaaggatatctagatatggattatagaacaaaaggtgtctgttcccagagcattcactttgatatcgaagataacaagattcataatgtttccttcgttggcggatgtaacggtaacctgcagggaatttcccacctggttgaaggaatggatgtagatgaggccatctcacgcctggaaggaatccagtgtggattcaagaaaacttcctgcccggaccagcttgcccaggcactgaaagaagcaacaggaaaataacttaaaaaatggcaaactaatagggaaggatcgctactcttgattcaatccttcccttctgccctactagtccatggactgattaacagccgcttttggtgattatgtgctcatttatttaattgtggtgtatcaaggaacaaggctctcacttttatctattagaatctaatttgtgagtgtccgagcgaaccaccgcgcagcggctgttaggccagcccacgggctgcatcttctgccgttggtgcgggagaaagatgcttatgggactaggatgccgttggtgtaggaaaatgtttcttcaattggttcttctcccattcttacaaagtgatctgcatgtactctgtaataatatccccggtcaacttgaatagacttagatgcagcaacataataatcattttctattttcttggaataagcgtcaatctgatgccattttccatctttttcattatatctatccacatatacaattacagctattgcatcaaccgtatggtttgctgtcgttgctccatatgtataaatccgtttggttcctgcttttgtaattgagcattccccatccatcagatgttcgccacgttcatcactcttcggtgtataccctgttgatgaatctgctgatatcagataagacccatcaaccatctcagccttactattatcagctttaacccccgtcacagacgcacataccataaagcaaaataccatcgtgcttgccaatatagacattatcttctttcttatcataagactatctcccccttttttattatcgtcttctgataagtaaacaactaagtcacaaaaaacttacgcgtttttacataaaaaataaattttttataattttatcaaattcttccttttccataataccttttaactgatattgaacacctttatattcaaattctgctatatatcttttttcttttgtttttctcacctcatattcttctaccctaatctgtcttcccttattctcaacttcatactcatctactaaattatccactgctttttgtcccaatgaagagtctttcgaattcatatacatcgaataacgtattatttcttttccattctgataaaaaagattggctcttctttgattctgatcaacactgtatttcttcaaagccatatcttccggcttatattctattcgaaccaaataatttcccattactttggcaatttctttataaacgccaacttcatcaatatcctcagtctctattgactccatattctccacgtctataccattattctgttcatctccattactatcattccacaatgtcttccaatacgacttactccccacactggtcatcacacttccgcacaccagaatcagcactgctgccagtactccgattacaagcttgcttttcttctttttgcggatgacttttttatgcctcttgtcgtattcgtaatcctgaatcttattgaaaagctctttttccatctcatcagacactgtaatgtcatccagtgacttgtcctcacggactttcttttcaatctgttcagcttcttttttcatttcattttccaatgataattttttcagttttttcattttcttcaccttattctctccagtttgtgtgtcccgtttttcttgacattttttcaaataagggtaatatgatgctataaggctagtgttctcaatttacttcgaacagtagcactctacactaaatctggaggttaatttatgaagcgaattatattgaccggcggtggtactgccggacatgtcactccgaatatagccctgattccaaagcttagagaattaggctatgatattcaatacataggttcttacaatggaattgaaaaggaactgattgaaccttttggaattccatatcatggaatttcttctggaaagctgcgccgttatttcagtctgcagaatttcacagatccattccgtgtgatcaaaggctttggtgaagcccgtaagttaatcaaaagcttaaagcctgatgttattttttctaaaggcggctttgtttcggttccagttgttcttgctggaaagcgatgcaaagttccggtcattattcatgagtctgatatgacacctggcctggcaaataaacttgcaattccatctgctgtcaaagtctgctgtaacttcccggagacgttagatgctcttccggaaggaaaagctgttcttaccggttctccgattcgtcaggaacttcttactggtgacaaggatgccgccagaaagatgtgtggctttacagatgaaaaacctgtcattctcgtaatcggcggaagtcttggtgctgtagctgtcaacgaggcggtacgtgctgcccttcctgaactgctgaaacagttccagatcatccatctctgcggaaaaggaaaggttgatgattctctgaaagaaatcaaaggctactgtcagtttgaatatatcaaaaacgaactgcgtgatctctttgctcttgcagatgttgttatctcacgtgccggtgcgaatgcaatctgtgaactgcttgctcttagaaaaccgaatcttctgattccgctttctgcccgtgcaagtcgtggcgatcagattcttaacgcacattctttcgaacgtcagggattcagtcttgtaatcgaggaagaacagcttacgaatgcaacgcttttggatgcagttcataacctgtacgaaaaccgtgagcagttcataaatgcaatgcacaattctaggcaacaggatccaattgctactattatcggcctcattgaggaagctgccacaaaataatgtagttcatctactggcaaccgtcttcataaaactacagtattcaaaaagataccgggaaactatcggcaccactgttccttatacactttttctttgtacattgaacagtaaacatttggttttgctcttagtcttcccggttcatttcttcgtactccgttccgtactttttcttaatccatttctttgctctgtgcagaaggctatgaagcacttcaagtcgaatgcccattaattctgctgcttttgcctgaggcatctccatgtaatatacaaggacaatagcatcgtaccatctttcattcttttccatcaaattggtgaaaatcttttcatgaagctctaacctttgtttctgaagctcatcttccagaaactgttcctctgcactttttacctgtgcttcatatttctcggtatcctcttcactgtcccaattctcatcaatctcgaaaatctcccggctatgctttttcttgtaatttaatgccgcattttttgccgttgtaaacagccatgaagaaatatttttcttcttcatgctgtcatatcccatatacagtttcagaaaagtgtcttgagtaatatcttccgcttcactataactgcctgaataagtgtatgccgcttttagaatgagatttttatattgttcataaatctcattgaattcgcgattttccgttaacatatcttctccagtactactttaatttttcaagtatttctttcttatcttcttctgtaagttctcccatatgccatccgagacctacattgtcattcttatatcttgggattaagtgcatatggaaatggaataccgtctgtccagctgcctcttcgttgttctgaacgatattataaccatcacatccaagtacatccgtcatctttgtaatcatctttttcgccagacagattgcttttgaagctgttgcctcgtcaatatcatacagattgcggtaatgattcttcggaaggatcagcgcatgtccttttgatgccggtccaagatccagaattactctgaactcctcatcctcatataatgttgctgatggaatctctccatttgctattttacagaaaatacaattatcatctctcatgatctttcctctttccattttattttatctgtagtatagaccatttttcagaaaaagagaatacatttttcagacaccaggtcgaaaaaggtcgaaaatagtcgaatgatttttattgaatgctgttttcggtggtgctacactcttagcgaactcaagaaaatctaactattaggagtaagtattatgttaacaaatatcgatcttgaaaaaatgaaccacctgatggaaacaaacaaagatgcaaaagagattatcacccagcttctgaagaaccatgatgctgctgttgctacaattgcgcatgagatccgcaaccctatgacggttctttattcttctatgcaattaatgagctctctttatgctgaaactgccaaaggttcctgtgtctgggaagaatgcatggatggcgccagacatatgtgtgatttactggatgatctgacagaactcaacaacggaaaccagttaaaccgtgcttcctttcctcttggacatgttcttcgcaactctgctgttctgttcgccatgtctctcaactttgagaaatcaaagattgagatgacttccagtattgataagaatataaaaagattcaatggtgatcgcaccaaattagaggaagtcttcttaaacatacttacaaatgccaaagacgctcttgccgattgtaagtatgccccacgtctgcagtttcgtgcaaagaaacttgacgataaaattctgattcaatgccaagataacggctgtggtattccaacggaaattgttgataagctttatgaaccattctttacaacaaaagaaaacggtaccggccttggtctcgcagtttccaaaagaatcattgaagcacataatggaacgatcgacattacatctgaccataccaatggaacaatcgtatcgatcacacttcctgcgtaaactatcagatatcgttaatatcagataccgttaggatcttttgattttttcttcgataggttagcagcgctgtcaggaaaccgcaaatcaatcctcctacgtgagctagattatctacgcctgtactggtaaatccaaaatagagactcagtacaaccataatcagcatgcctcttcctgacagcgttccgagccttcccctgtttgcaaatacaatccaaagcaaccctcccatcagtccgaaaattgctcccgatgctccggcagatacaatctgtctgtcgtgcatggtattccagtataaagacagcagattaccgcctattccgctgataaaataacagaacaaaaatcgaattttaccggcctctttttcaaaaatcgatccaagagcccacaaaagcaccatgttatttaataaatgtgagattccaaaatgcagaaaaagactggtaaacagtcgataatattcctgattttctataatatacggttcatacatggctccatgctgcaacataaaataaccattctctgtccgtccgatcatggtaagagcaataaacaccagaatattgatccctatcaacatgatcgtcattatttcttttggtctctctttcattcttcctgactcccttttgacttctatgatatgtttttgaatctgcgtatactataccacatcctatatatcattcatagtcatcggcttctgttatcagatcttcccattctccccattttccagacttaaagcgttttgcaaatttcttgatcggaccatatctcttttcttccatcactgcataattccctcccgacttgctataatagctgttttcctgtacctcaatgttttgattttcttccatttctattctgtctttttctctcttactttcttctctgatcttctcttctttggacttttctttcctgttttttgcttcttcctcatactgctgcagtatgctttctatatcataggtttcttttagcgtttctttgtgaagcatgcaggcaagttgaatactctccagatcctgataatcaactttccttacaaaatactccgtcagctcatgataagacacctgccaggtcttctcattctctgggaaaaaacagaaaaaatagttttcatccttttcaaaaatatatttttctgaaagcatcagataatttggttctaacatataatctttcattttttccataacactgagaaattgtcttgtcagttttaatatctcttctgctttgatatctttatttttataatacgtttccaacgactgtgaatgtcctgtatgataataatatctacttgcaccttccattccacatccacttactctcaataatcctggaatccgattattcttaatcatccgcatctgataattctcccgatacggttgtacgctgtctattatgatttcagactctgccactctgctctgctgatttatctttttttctttcatctgattttcttctcccttcactttttcagctttacagaagtctattttttccatctgactttttcttctggtttcaccttcgttgcacgttgtatcaggtgaatcttcattcgtccttttgatgcaaaaacttctacctctattttcttccctgatagatcaactctggttgttacattttccagaaaaatcaattttccactcgtcctttctcggaaaaaagcatccagatctacatcttctatctttttcctgtccatttcaactcctgtcacagccgtttccgctgccgctgcgtttaaaattgccttatcatgaaagtaaaaaataatcgtgatgagcagaaaaaataaaattaagcaaaaaggaataaggtaagacatctctaccactgtacttcctttcacgtattttttcgtatatttttcagtaaactccaccaatcatgcctcccagataagcaactgtcagaaatggaataaacggaaatgaattttttcttgtatacttctttcgtgcgatcataatccctccgtaaacagatgcaatcagaaatgcagcaaacagaatccaaagaagattccatccaccagataaaattccaaggatcagaatcaatatgctatctccgtaaccaaacgactcttgtgtgaaccaacttaaaaagagaaatactcctccacacaatccgccggctaccatcatcctgagttctcctttgctgcatagtacctgacataaaactgtaatcgcaagcaaaatcaaaagacttcttacacttactttcttccaacgaatatctatcacagacaaaatcaacagatacaccgctataacagcttgaaaaaacatccatagattttcccttccattttgcccgaatacattcattattttgcacatttagaacatcctcctcttcctgctacttcgcttttatgaactgcacgtattgttctcttcagagaactgcaattcaatgagttgtgataccggtttccataactggtaatatatacaccattcattgcctgtccataaacacattgctcacacttatggtattttcctccaccttcatttctcatattttgtaattctgagtattgaacatattgaatagataattgaagatagctgcactgataatccgaatgccacactgttcctttttctgtgatatagacaatctgtccgtcttcattttcctttctatctttttgataaccattccatgcactgactttaaactcatctttcaacttcaccgaaggacttttcagtaatggaaccggaatctttatcttgtactcgataacaacatttatctcttctgttcccggaatccaataagacttccagcaactgatcgctgatgtaccaccattcagaatacttctctcaattctttcttctccaatcagattcaccagatttgattttaattgaattgtattcaatacaggaaggacagccgttgactctgctgcctgtttggctgcatcacttcctgctgcatggatacagcctcgtatactctggatttcaattaaaaaaatcaaacttaatactgcaaatatgaagaggggaactgcaaatgcagcttctattgttacacttgctcttacccccggtgcagatgccctttctcttgttggactggtattttttacctgtttatttgacatcgcagcttttcctttctaaagtgtgtgggtttcctgcaagagggattgcaggattctgagtgtacgttttggggtgtacaaaagaaggtctgaaagggcatctgcaccgggggtaattctggcttcattcatatccgaaataaaccggatattggtaatttagatttttataaacggttatcttattctgtatttctaatttagtcacacattgatctgcctgaaacaaaatatgtttggaatggagtgcctcttctacacaatctaaagtccgcattgtaatttccggcactgatttcaaaaagagaaacatcctgatataatcggaatatccgactccttctccggaatcatttccccttacacttccaccatctgtcagaagaagtggcagttgtgacagagaaacaacccatttatctgcactttttaccagtggaacttttcttccatccaaaagacaacgaagatccataacactttctcctcctgcccacgcaacaagtatcatctgtttcaaagcttctaccgcttcaggcatcagtagtagtgcagatattgtcacagccagcgcttctgcctctgccactcgtcccatatcctttgccagacaaccataatttcctgacattctcagaagaaaaagacgaaataacacggattctagattttctttatctgagactttcccttgtagaatatattccagttcgtatgctaaagcatccgaccggtcagactgccattccttctctccactctcatccattccttctgattgttctgaatcctgccgaaatgcatagccgaatgttttgagaagatattcgttgtacagaagtttctccgttgtctgatcaagtccttttcttgttgggaatgtcccatatccttttttcaaagttctctttgatgcctgccccgacaaatcaacactcttttcagatactttttttcctttcggaatcacaacagaaagaattccttctttttttatcttttgcataatacgaaacggattctcctcatctggcagacttggaccttcttccacgtcttctccttccgtttgactgccggatgcgtcaagactatcattcacccgttccattgcatctgtcatttcatctgttttcttttccatatcagattcttctgtctctgtctgttcccatttctctgttgttccggtaaacttttttaccagattcattccatacctttgttccatataagccagcacctgttctcgaaatgcctgtccggattgatctgtcaaatactggattcccttgatttgatgatctgtagaacccgaattgtaataatgcaaacgctggatcagattttcttcttcataatttcctgtcctgtaaccaagatcaattccaaaaacatgatattgttccataagttcctgatgatattctccgaaaacggaatagattgcccgatctgtgtcaattctgctgagattttttgatccttgaatcacagcagactctagaattccaaagataaatgaaagtaacaaagtaaatgataaacttaaaaatacagtgatttcgccttttacggaccgcatgctatatgccggagctttctgatgtcactttctcaaaaatcgtagtgatcaaactaatcaactgttctttaaaaatcagcagaagcgcaattaatataaccattaaaaccagttcaattgttgtgatcgcagcaacatatttcttatctttattttttcttaccaataattttctcatcttgtatctctccttcttttctctcttttttctcaaatctgaatcgtcaaaaacgctggaacagtcacgatcacgaacacgactgccaacataagaaacaacggtatcatcaactttgttcctgcctcttcaccaagtttctttgccatattttttcgttcctcaaaagcttcctgcgcctctctttgtaacagattcgtcagtcccctggttccttttcttaaattctgacttaaaagcattccgaactttcggtaaaccggactctcgcacctccttccaaatgcctcgtagcattcacattccgttcttccattcttcagttcattcattgtatatctcatctcttcatacactgttctttctccaagatagtgtttctctttgtcatattcttttacaatttggatccaggctcttctcactgtcattcctgcccctatatacagactgaatttattgatcaactgcggataatcaaactgcatctgtctgatttctttctttcgtttttctttctgcttttgtttctctgctgtaaattggaatacaatcatcactccaccaagtaaaagaattccaaatgctctcatttctttcactggcttccaggataattttcttccatctacctgatctggcaatatcaggtaatccttttcccgctgttcctgatctgctttttctacttcctgggatatctttttcagaaccccctccttctttgacaacggtgtggaaaacaggtgtgcataaaattcacaggacattttttcctcatcatatcgaaggacagcggttaatttgacgagtgttccttcttccgtcagcttctcctgctttaaaacacctctgctgttcataacctcgtagttatcaagttcccatgacacgctgattcccgtatgtggaatttccataataagattcaggtctgacctgatctcatccagacttttgttttcaccaaggatctgagctggaagttcttctgccgccttagaaagctgttctccaatctcttcttttgcatacttcttttccgaaatctgaacctttatcttctctttccactcgcctgtctccatctggatgttttctgtcttttttccttctccctgtccttttctttccaaaatccggtttccattttcatcctgtgctaattgacgatgattatctgtgacatacactgcactaaacattacaattgacaataaaagaacaattcctgtctttttatagattccatattttcctttgtcaggctgaagtacttttttccacttcttgttaaatctcaatctgtagcaacctccttccaaacctgtatgctccaagataaagcacaagacaaatgctcattacgatacatccggtccatgtaccatacaggacacttaagaattcaccaaatgtcatcttcatgtagagaatcattataaatgggattacgctcatgatttcaaattccagctttttcgcagccaacatggtctgtatctcacgttctgtatcgatcttctctccgattgttctggccgcatctctgataatcgcaatggaatcccctccactgaccttagccgctgcataaactgtaataaaattcgtcacatcctcctgctttacttctgccgcaaattcattcaatacagttacaactgacagattcagatccagcttccttaccatctgaccatattcttttcgaatccttgtattcgcatcatacattccgatcagatcacgatttgtttccctgattgcattctctacagaatatcctgccttaagtgcccctgccattgtctggatactatctctgaactgccttctgaattcctgttcttttccgattgctttctcttccatccactctttcatgtataagaaccataacgggaacaggagaattgccggaagtattgattcataaaacaaatacaaaatcagaagaaatctcaccgtacattttatgattccgacagtatattcagacggtgtgatatcctgcagccaggagtttttctttattcgtgatttcatttttcttcataaggcatccctgtatctttccattcttcatcccctcctccttaaattcataaagaacctttgtctgaatccttccatcttcataaccttccacttctacaatctgcaaaacctttcttgtcttatctcgaagtctttcaagatgaatgataatatcaagtgccgatgcaacctgtctttgaattgcctgtaacggaagatcaatccccatcagcatcattgtttccagtctgtgtaacatatctgttggattattggcatgtcctgttgacattgaaccactgtgaccattcaacattgctgaagagatcatatctaccgtctcttctcctcttacttctcctacaacaattcgatccggtctcatacgaagtgctgacttaatcaaatctctgatggttacagccccttctccttctgcattcggtccgcgtgcttctaagcgcaccagattctgaactccttgaatctgtaactctgcattatcctcgatcgtgatcaggcgttctccttttggtatatagttcgacaacgcattcaggaaagttgtctttcctgctcctgttccaccactgacaaaaatattatattttgctgctaccagctttttcaaaaagttagcggcttcatcagttacgctgcctatacggatcagctgttccatcgtaattgcttccgatggaaactttcggattgtaaggattggtccattcacggcaaccggattcaatacaacatttactcgagatccatccttcagccttgcatccacaatcggagaggcctcatttacataacggttcgattcacctacaatctgttgaatcacatccagtaatctctcctgagacaaaaaacacttcttagaccggaaaattcttccttctttctcataaaagatatggtcgattccatttaccataatctctgtaatcgaatcatcttcaagaagctcctgcagaacatccagtttacgaaaagagttgaataactcacgcccgattctgatcttatcactcaacgaaatatattcttcatctgctgcctcatccaatactgtgcgaatcagctcctgcagttcttcatcatccgtctccttcgtaagatcgatttgttccaggatctgttcatacagctgctcttttctaatcatccttacgacttcctttctctgtccggaaattctgtaattttacttgcagatgcttctaaagcaacaggatttcttggctttcccattctgcgtcttaccgtcttcttaagaatctcgccatatcctgctgatctaagattctcttcatactgattgagttttgcttttgctgcaccttcctcaatgtaaggcgtataaactttactgcatcttcctaacagatcatacagaccgtctaccgtatctccaagatcaagaatgatcactttgtaaatactcttctccagaatcagatccaaaagttgattccattcttcttttgtcacttctctgaaatcttgttctgcccgaatcggtgcgatataatccaccccattcatatggctgatcaaagtactgatcttccataccggattgatactttcctgcttcatgtaatacagcagatctccaagattcattccggattcttccggcaggtaataatttaatcctgaatacccttccagattcagatacaacgtaggaatcgattctgaaagaactcgtcccatacgcatggcaaaccttgtcttcccgattcgatgaaccggtgaatagatcccgatcagaccatttacatttgctttcactgtctgcgatctgtctgagacgagttggatctgattcgtctgtacttctgaattttcctgaactttttcctgaagtaaaagttccagcatactgctgacactctgataccggaagaatggaatctctgtgggacttctctcgttcggaatcttctcgccgatcagaagatacttctgtcttgccggaatctcatcccggtcttcttttccatactcttctccgatcagcagaatatttacctgcatactcttggctgctattttcagattctcaatatcatggaatacatgaaactgaaaataaccggataatttctcagataatcttctgaacagattttctgaataactcttttgtgtatcacaaatcacaaaattctcagcagttcctcttactgctctttgctcaattgtcataattcgaaactttgctgcgatcatacagcctgaataaagaaattgtaccgaaggtccaacgcttcgatgcaaaagatacatcagtaattccccaattcactgatgctgcaacagatgattttctgttggtaagtgagattatatacgggcacttctgttttgtccataccaaaattaaaaatataatgtttttgtaaaaaacttacaaaaattgataccatgtaatgctataaagaagacaaaccccaggaattccaagggttccggatgtcaaaaaggtcatcggattcaaaccgacattaattgaagaatctgctggaagaacatatttgtttattataaaaatcaacgccattcctatggttgcacgtataaaaaacttaagaaaaaagtatcctgttttctttttcatttcactcttccaatctgttttttcttgatttgtaactgttcagagccaagcaaaatttcaaaaaacaggtataaaatgcttgcatttttaagactgtttttgaaattttatttggcggatacgccacaccgacgaaatgcgtagcattttggaggttagctctgaacagttaccttgatttattttattttttccgtctcttttttattccttttgattccattttcaattctttataatcaaaaaagaaagcggctaaagttcactgtaatcaagtaaactccatccactttctcttatctttttatttttcaggacagcttacaatcttctgtaaaacataacaactttattcctctgttgtttcctgctcagttgtctcagaaactgatccttcctctgatttttcagactcatcttcatcagaaatctcaacttcttcaccgtcgatctcggcagaagcctttctcaccttcgcaacgcttgctacagtgtcattttccttcaggttgatcagttttacacctgatgtgattctgccgtaaacagagatatcagagcacttcatacggataataattccctctgtgttgatgatcatgatctcactgtcttcatctacagctttcattccgacaacatttcctgtcttctctgtgatcttataacatttcacacctttaccgccacgattctgacgagtaaattcatccatgtctgtacgtttacccataccacgctcagatacgatcagcatatctttgccctggctttcgatctgcataccgatcacaacgtcattatctgtcaggttcataccgcgtacacccatagaaacacgacctgtggaacgtacatctgtctcattgaaacggatacacataccgtattttgtaacgaggaaaatatcctctgtattatctgtgatcttaacttcgatcagcttatcatcctcacgcagtacgattgccgcaagtcctgtctttctgacatttgcataatcctgaatcggagtcttcttcacaagacctttctccgttgccatgaacagatacttgccttcctcatactcacgaagcggaatgatcgcagtaatcttctcttccggcatcagctggagtaggttaatgattgctgttccacgtgcagttcttcctgcctccggaatctcgtaagctttcagtctgtagacacggcctgtgttcgtaaagaacataatgtaatggtgactggttgtaataaacagttcccggatgtaatcatcctccagagtctgcattcccttaatacctttaccaccacgattctggctcttgaatgtgtccatagacattctcttgatatatccaagttttgtcattgtaattacgacattctcgcgcggaatcagatcttccatggagatgtcaaattcatcaaatccaatcttagttcttctgtcatcaccgtatttctcagcaattacaagaatctcttttttgatcacaccaagaagaagttttttatcagcaagaattgctttatactcttcaatcttcttcataagctctgcatattcagcttcaatcttctcacgttccaaacctgtgagtgcacgcagacgcatatctacgattgcctgtgcctggacatcactgagtccaaagcgtttgatcaattctgcttttgcttcctgaacattcttagaaccacggatgatgcggatgacttcgtcaatgttatccagagcgatcagtaatccttccaggatatgagctctctcctgtgctttattcaggtcatactgtgttcttcttgttacgacatcttcctgatgacgcaggtagtactgcaacatctcaaggagattcataaccttcggctgattatcaacgagcgccagcatgatcacaccaaatgtatcctgaagctgtgtatgtttatataactgattcagaattacattcggattcacatcacgacgaagctcaatacagattctcataccttcacggttagactggtcacttaaatcagtgattccatcaatctttttatctcttacaagctcagcgatcttttcgatcagacgtgctttatttaccatatacggaagctcagtaacaataattctgttctttccgttctgcattggctcaatgtttgtcaccgcacgcactctgatcttaccgcgtcctgttctgtatgcctcttcaattcctcttgtaccaagaatctccgcacctgtagggaaatctggtcccttcacgatttcaaggatttcctcgattgtcgtctcttctttatctgcaatctgatcatctatgatctgaacaactgctgaaataacctcacgcagattatgcggcgggatattcgttgccatacctactgcgatacctgatgttccatttaccagaagattcggaaatctggacggaagtacagtaggctccttctctgtttcatcaaagttcgggataaaatctacggtatttttgttaatgtccgctgtcatctccatagagatcttactcagacgtgcctctgtgtaacgcattgcagcagcgccatcaccgtccactgaaccaaagtttccgtgtccatctacaaggggataacgtgtagaccactcctgtgcaagattaacgagagctccataaatcgagctgtctccatgaggatggtattttcccatcgtatcaccgacaatacgcgcacatttacgatgcggtttgtccggtccattatttaattctatcattgagtacagaattcgtctctgtaccggcttaagtccgtctctaacatccggaagagcacgggcagcgattacgctcatggcatagtcgatgtatgaagtctccatcgtctttttcagatcgacttcatggactttgtcaaaaatattgtcttccatcacttgtctccttttttctagggtcagtctatcatattcaaaatctgactggatttcgcattttcacgcttcacaccagctcaaaaatctggctggtcttcgcgttcttacgctccacaacagctcaaaaatctggcgattttttcgctgggttggcatttctaatgccaacccagatagattcatccaatcatgctttcaagtaaacttgaaacatgcttgactgaatctacctgttgtgtcgctataactactagatatccaggttttgtacatactttgcgttttcttcgatgaattctcttcttggttctactttgtctcccataagggttgtgaaagtaagatcaagctcagaagaggtctcatcatccattgttacgcgcaggaggattctgtgctccggatccatagttgtctcccaaagctgctctgcatccatctctccaagacctttgtaacgctggatcttattgttgctgtcacgaccaacttctgtaagaatctggttcagttcgtcatcgctgtatgcataccataccttcttgttcttctccagtttatacagtggtggctgcgcaagatatacatatccctctttgatcagatccggcatgaaacgatacaaaaatgtcaaaagaagtgtactgatgtgcgctccatcgacatcggcatcggtcatgataatgatcttgtgatatctcagcttactgatatcaaaatcttcgtgaattcccgttccgaatgctgtgatcattgccttaatctcagcatttccgtaaatcttatcaagacgtgctttctctacgttcagaatcttaccacgaagtggcaggattgcctgagttgcacggtctctggctgtctttgcagaaccgccggcggaatctccctcgacaatatagatctcacacttggacggatctttatctgaacagtctgccagttttcccggaagggacattccctcaagagctgactttcttcttgtaagatctcttgcttttctggctgcttcacgggcacgctgtgccataacagacttttcgatgatcatctttgcaacacttggattctgctccaggaagatctccagctgtgttctgacgatattatcaacagctccacgtgcttcactgtttccaagtttctgctttgtctgtccttcaaactgaggatcctcaatcttgacactgacaatcgcagtcagtccctcacggatatcctctcctgaaagctgctcattctctttcagcagcttatttttcttgccataatcgttgaataccttagtcaatgcacttctgaatcccgcaatatgagtaccaccctccggcgttgtaatattatttacaaaaccgtaagtagtctcattgtaggagtcattatgctgcatagcaacctcaactgcaacattatctttcataccttcacagtaaataatctgctcatagagcgcagttttactcttgttcaggtatgttacaaattctttaataccaccttcatagtggaatatatgctcatggatctcttcctcacgaagatctcttaagtgaatcttcaatccctttgtcaggaatgccatctcacggaaacgctgtttcagtgtattataatcaaatactgtttcctcaaagatttccttatccggaaggaaagtaacctttgttcctctcagctccggctcacattctctgtcaactctgagtttatagcatactttaccacgctcataacgctgtttataaatcttgccttcgttggcaatctctacttccagccactcagaaagagcattaacaacagatgcacctactccgtgcaatcctccggataccttgtaccctccaccgccgaatttaccaccggcatgcaggattgtaaatacaacctcaactgcaggaagtcctgccttatggttgattcctacaggaattccacgcccattgtctgtgaccgttatcgaattgtctttgttaatgtctacctgaattttatcacagtatccggccagagcctcatccaccgcattatctacaatctcataaaccagatgatgaagtcctctgacggaagtgctgccaatgtacatacccggtctttttcttacggcttccaatccttccaaaatctgaatctggtccgctccgtattcagcgtcaaattctgtacctgatgcacccattcttaaacctcctagttttcttttgctacatgtccacttttcacatggaatatcttgttgatagaaaatctatgatttacaaactcatccagtcccgtacaagtaatcaccgtctgtatatcatgaatactatccagtaaatagttttgcctgtttttatctaattcagacaaaacatcgtctaataacaggatcggcgtatccccaatgatccgcttcaccagttcaatctcagctaatttcagcgacagcgcagctgttctttgctgtccctgagaaccaaattttctaatatccaaatctcctgacaggaaacacagatcatctctatgaggacctacagacgtacttttcatccgcagatccctctccctgtttttcttcagagcctgctccatcgacatctcaccaatacttgattcataagtcaatgacagctgttctttcccgcctgtcagacggaaatgaatctctgaaataatctcattcacctgtcgtacaaattcttttcttctttccaaaacctttgttccataagcagccagctgcatatcccagatatccagtgtctccagcaaatgctgctggttcgagccatagatatccttcaaaagtgaattacgctggttaataatacggttatagttcgaaagattattcagatagatcttatcaagctgggaaagctcaagatcaataaatcttcttcttcctgccggaccctctttgataatattaagatcctccggagaaaagaaaacaaaatggacaataccgaataactcacttgcacggcgaatcggtaccttatcgattgcaattcccttcggactgtttttcttcaggtgcatatcgatctggaaaatgattccctttttctcaactactgtctccagatgggattcatcatgcccaaactgtatcatatcccgatccttcgttcctctgtgagatttcgtcgttccagacaaatacaatgcttccagtatgtttgtctttccttgagcattgtcaccgtacaaaatatttgttttcggatcaaaggtcaaatctaataaatcataatttctgtaatttttcagctttaaagacttgattatcataatttccccgccatcacgttataacacgagcgagaaaacctctcacatgttattctacacgttttttaattatttttcaatttttatttcatttccatcaaaagaagctgtatcgcccggataaagctttcttccgcgtctcgtatcaatttctccgtttacaagaacaagcccgttctgaattacgtccttagcctcaacaccactttcaactaacccggctgccttgagcgcctgaccgagtttaatgaattcatcctgagggcgcagtttgattatttccatttcttatcactccttaattaatttttatcagtgtttttgatctttatttttcgtttaaactttttaaatatttttaaacttttaattttctagattttgaaaagtcaaaaaattgcagagcagggcgtctgctccgcataatccattattttctgagtttagacagctgcattaaaattgactggaagaatcagataaatgtaagactgattctcgtctttgataaagcaaggtgcttttgcattcataaaatacaagtctacttcttcatcttcaatcacacgaagtgcatcgatcaaaaactttggattaaatccaatcatcagatcttttccgtcttttgtacagaaaatcagttcatccatagatccaatctgtgatttgatcttcaactccattgattcattcttgatgtcaatgataatcggctttttgtctccctctttgataagcagagttgcacgatcaatacaatctaacagttcttttttattcacatgtactcttgtctcataatcactggacagcatctgatcaattcggaaatattcaccttcaatcagtctggaaacaaccaatgttctgtcaaattcaaaaacaatatgattttttgtaaacgaaatctcaacttcagcatccgcttcaccgccaataatcttgctgatttcctgaagagtttttccaggaacaattacttttctcggctgataagcatctttcagttcgattttccggattgaaattctgtgaccatcaagagaaaccactctgagaacatcattgtcaatctcaaaaagttctcctgtcatcatcttgttcgtatcattgtcagcaattgaaaaaatagtctggcgaacaacttctttcaaagtaaactcggaaatagtaataaaatcttcacgctcaatcgccggaagataagaaaaatcatctcctgactgagctgcgatattaaatttcgctttttcgcaagtaataattgcctgattgtcagattctgtttcaataacaacatcattgtctggaagtttacggacaatttctgaaaaaatctttgcatttaatgcaataatacctctggaatcaataattccatcaattgtagtttcaattccaagttccatatcattggcagtcagtttgattacatccgttgttgcatcaatcagaatacattcaagaataggcattgttgttttagagggtactgccttggaaacaatactgactccttttacgagattcgattttttgcatatgattctcatgttgatgattactcctttcaggtttcaaggttacagttgatatgtggataacgttttttcctcgcgtaatttatgtatatttatataaatcgattccgtctcctccgccttagggggtgtggataagtggataagtacctgcagccctttaaaatcaagggtttgcgggtttggataactatgtagattacagaaaaataacgtgttgaaactgtggggaaaaaaatttggcaaaaaatccacatttttgttatcccaacgttattcacatagaaatctacaggttttctacaaagttatccacaattaacgcgaaaaactgacaagttattcacattttatagagttatcttccttatacaggattgattttcttcttaattatattcacagtgttgtttaaagcttcatctgtcttcagatcattctcaattttgcgtacaccatggctaatggaagcatgatctttaccaccgagcagggcaccaatggattttagtggtgtatcggtcatatttctgcacagatacatgacaatctggcgtggaagaacgatctcagcgtttcgttttttaccttttagttcagttaccggtacattaaagtgttcagaaactacatccatgatcagttctggtgaaactgcacgggtatcatccggtgagatcatatccttcaaggcctcagcagccaaaggaatgtcgatcggtttattctccagattagaaagagcgatcagtttattcaaagatccttcaagctcacggatattggatttaatattattggcaatgtactgcataacctcatccggaatatgatatttctcaagtccgtcgagttcttctttcttacgaagaatcgccattcttgtctcatagtcaggagaggagatgtcagcaatcagaccccactcaaaacgtgtgcgaagtctggcttccagtgtctcaatgtccttcggaggcttatcactggagatgataatctgttttcctgacacatgaaggtgattaaatgtatggaaaaattcttcctgtgtactttcttttcctataataaactgaatatcgtcgatcagaagaacgtcattattgcgatatttctcgcggaatgtggtcattgccaattcatttccgttcttacctactttaagagcatcgatcagttcattcgtaaaagtttcacttgtgacatacagtacttttttggagggatcatgttccaaaatgtaatgtgccacggagtgcatcaaatgggtctttccaagtccaacacctccatataagaagagagggttgtagatctctcccggagattcggcaactgcgagggaagcagcgtgagcgaaattgttgttgcttccaacgacaaatgtgtcgaacgtgtactttggatttaagtttgccttttcataaatcgcatttacacgggtcttctggacggaagattctttcttttccttaatcactttcgggctgtcggttacaaattccacttcatattctgtaccggttacttcggcgatgcagaccttaaaaggaagcagatatttatcttgaatatgttcaagactcgccttcagtttgacgagaatatatacggtattgtccttgacttcataaacagtaagtggtgcaatccatgtagtataagaaatattggatgagcaatattccagcttcatcttgtttagtacctgatcccagttttgttctacaatgttcatcgatagtaactcctaattttttaaaattataatggaaaggttgaaaatccagcgcaaataattcaggacttatccacattcaactcctgattatggcttttagggcagacttccccctacccaaatacaatgttttcagcaactgtttgttaaaaaagtgaaaaacagccactttttattaacttcgtactaaaataatgtggataactctaaaaatggtagagtctctccattacattctacatcaaaaaagctgtagaatcaatggaaaaacagtgtgtataactttatcaacatcttaaaacgttgataaatatggttttttatgaataaaaaaaattttatcaacacgatatttagtggttttccacaggttatacagaagttatcaacatatgtggataactttgtggataacttctgtataactgttgtataattatgtgaaaaaatagttgtatcccttgatatataaggggttcgaagaactgtgaaattattcacagaaaatgtgaaaaactctttaaaatgaaaaaaggccagaaattgagggaaagattgttgataaagcttgactttatgcggttttccctctataattaagagcagtgtcttttaatattgaggcgcagtaacgaagttaattttgtgaatacttttattataaggtatatcaggcataagggaggtgtaagaatatgaagatgacatttcagccgaagaagagatcaagatctaaagttcacggattcagagcaagaatgagcacaccaggcggaagaaaagttctggcagcaagaagagcaaaaggaagaaaacagttatcagcataggccgcatatatgtggccttttcttctatttaatattaaatgataacaggatttttgttatctggaatgaagaggatattgatgaaattttctgagtctttaaaaaagaataaagattttcagtcagtctacaggaatggaaaatctttcgctaataaatgtcttgtaatgtatataatcccgaacgaactgaataagaaccgactgggaatatcagttagtaagaaggttggaaacagtgtggtaagacatcatcttacccgattgatcagagaaagttacagattatcagaagaacatttccgatgtggatatgatatagtagtaatcgcgagaacaagtgcaaaggataagaattatcatgatgtggaaagtgcactgatccatctcggaaagcttcatcacatatatgtctgataagacaatgataaggaagtggcgcagatgaagtatgtcttgttatggatgattcgtttttacaggaaatatctgtccggaatgaagggcggatgcacttgtaagtattatccaacctgctcacagtatgggttggaagcaatcgagaagtacggagcactcaagggaggggctttggcggtatggagaatcctgcgctgtaatccattttcaaaaggtggatatgatccggtaccttaaggaggataagtaatggaagtatacggacttttggcttcaggttatggagactggccgattatcaaacagattgcctggcttttaggtcaggtaatgaatggtatcttcaatgtacttagcaagattggtattgagaatattggtgtttgtatcattattttcacaatcattatttatacattgatgattccgcttacaatcaagcagcagaagttttctaagatgtcagctgttatgcagccggagatcaagaaaattcagaaaaaatacgaaggaaagaaagatcaggcttcaatgatgaagcagcaggaagagatcaatcttgtttatgagaagtatggaacttccatgacaggtggatgcctcccgatgttgatccagatgccgattctgttcgcactgtatccggttatccgtgatattccgacgtatgtaaaaggtgttaaagatgtttatatgcctgtgacagaagcaatcatgaatacaaatggcttccagaagatcatggagacgatcggtgaagcaagcccggttcttatgaacccaaaggcttatgattattctcaggcagatacaattgtaaatgtactttataaattccaggattctacatggaatgcgctgatggaaaagatgccgagtatcacggatcttgcacagcagacaatggataaggttactcatctgaacagtttccttggaattaatatcggagagcagccgctgacacagctgacaactgcattccacaacggatccgttgtagggatcatccttgcagtacttattccggtacttgcaggtctgacacagtttatcagtgttaagcttcagccacagccggcaggagatgacaaagataacccgatggcaagctctatgaagacaatgacatacacaatgccgctgatctcagtatttatgggattcacacttccggcaggtcttggtctctactgggcagcaagtgcagcagtaagatgtattcagcagcttgcaatcaacaaatatctcagcacaaagtctcttgatgagatgatcaaagagaaccaggagaaagcacagaagaaacgtgagaaacacggagctcctgcaaaagagatcaataagatggcaacaacaagtactcgtaatgtgggtactgttacaaaaggaaaatctggaatttctgaagcagagagagaagaaaagatccagaaagcacagcagaaggctcagaattctaagccgggaagccttgcttctaaggcaaatctggtaagccgttataacagcggacagcagacaaaccagccgaaggcagaagatgagagcagctccaaaggaaaaaagggcaagaaaaaataaaggaagattcgtaactcctaaccgttctcttaaaaagcaggagacgggtcaggatttgaagatggaggaatcgggatgaacggtagtatcagagtatcggcgaaaacagttgatgatgcgatcacagaagcattgatccagcttggtgtaacaagcgacagactggagtacgaagtaatcgagaagggaagcgcaggattcctgggaatcggaatgaagcaggcagttattgaagcaagaagaaaaccggaaccgaaagaggagaaggtagaagagcctgtagtagaagaacctgtgagagtagagccaaagaaggttgaagcagttcagcctcagaaagcagctgcagaaaagaaagcggatgaacctcagaaggctgcttttgaaaaagctgtagaaaaagaagtaaaagaggaagttaagaaagagacaaaacttgtagaagttcagcctcagacaatcaaagcagtagaagatttcctcaagaatacaatgaaagccatggacatggaagttgagcttaagactgagatcgatcaggacggtgcactttgtgtagatatgagtggagagcacatgggaatcctgattggtaagagaggacagactctggattctctgcagtatcttgcgaaccgtgtagcgaacaagcatcaggaaggttatgtaagagtaaagcttgacacagagaactatcgtgcaagaagagaagagactctgagacaccttgcaaagaacattgcacataaggtaaagagaaacagaagaccggtagcacttgagccgatgaatccttatgagagaagaatcatccactcagcactgcagtcagatccttatgtgatgacacacagcgagggagaagagccgttcagaaaagttgttattactttgaagaaataatactgtttatgaatcggaagcgaaaggacgtttacgcttcacggatactttcgtgaggtgtggaacgtccttttttctatgtaaagtatagaaaaaaggaaataatgtaaagagaaaacagaaaggaaataaggcatgaatcaggatacgattgcagcgatttctacaggtatgactaattcgggaatcggaattgtaagaatcagcggaagtgaagcgctggagatagcagatcgtgtatataaagggaaagaaacgattacagaagtgccaacgcatacgattcattatggacatgtaatggatggagatgagacagttgacgaagtacttgtgatggtgatgcgcggacctcgcacatttacaggagaagacacagttgagatcaactgccacggtggaacttatgttgtaagcagagttttggagacggtcttaaaggcgggagcaagaccggcagagccgggagaatttaccaagagggcattcttaaacggcaagatggatctgtcacaggcagaggcggtcattgatgtgatcacatcagaaaatgagtatgcgttacagagttcgatcagccagctcaagggaagtgtgaagaacaggatcaaagagatccgtgagaagatcatttatcatacagcgtttattgagactgcgctagatgacccggagcatatcagtgtcgatggatacggtgaggtgctaaaggaggcagcagaagaggtgatcgggcagctgaaagaactgattgattcctcggatgatggaaggatcatgaaagagggaatccagacagtaattcttggaaaaccgaatgcaggaaagtcttcacttctgaacattctagctggtcatgaccgtgcgatcgttacagatattgaaggaacgacaagagatgttctggaggaacaaatccgtctgcagggactgactttgaatatcatagatactgccggaatccgtcagacagacgatatcgtggaaaaaatgggtgtcgataaggcgaaagaatacgcaaaagaggcagatcttattatttatgttgtagatgcatcaagaaatcttgacgaaaatgatgaaaaaatctttgatttgatttatgataaaagaacagtgattctgcttaataagtcggatctggataccgtagtgacagaagagatgatccgcgaaaggatttcacaaaaaggtgttcagaagcagattcctgtgattgcgatttctgcgaaggaagagcagggaatcaaggaacttgagaacaccgtgaaagcaatgttcttaaagggagatctctcattcaatgaagaggtttatattacaaatgcaagacagaaaaatgcattggtcaatgcgagagagagtatgaagaaagtcattttcagcattgatgccggcatgccggaggatttctattcgatcgatctgatggatgcctatgaatcacttggaaatattaccggagaatcaataggagaagatttagtaaatgaaatattcagcaagttctgtatgggaaaataaagatgaatatgatgttgtcgttgtaggcgcaggacatgcgggctgtgaggctgcacttgcgactgcaagacttggatttaagacagtgatctttacggtcagtgtggacagtattgcgctgatgccatgcaatccgaatatcggaggaagctcaaaggggcatctggtcagagagttggatgcacttggcggagagatgggaaaagtcattgaccagacatttatccagtctaagatgcttaacagttcaaaaggtcctgccgtgcattcactgcgtgcacaggcggataaggcaaattatagtaaaacaatgcgtcaggtgcttcagaaccaggagaatctagatatccgtcagatggaagtgacagagatcctggcagaggatgggaagatcacaggagtacagacgtactcaggcgctatttaccgctgtaaggccgttgtgctctgtacgggtacatatttaaaggcacgctgtatttacggcgaaataagcacacatacgggccctaacgggcttcagagtgccaactacctgacagatagtctgaaagcactcggaattaagatgtatcgattcaaaacaggtacaccggcgcgtattgataagaatacgattgatttcagcaagatgcaggagcagaaaggagatgagagggttgtaccgttctcatttactacagatcctgagagtgttcagatcgatcaggcgtcctgctggctgacttatacgaatgagacaacacatgagatcatccgtgacaatctggatcgttcaccgctttattcaggagcaattgaaggtacgggaccgagatattgcccgtctatcgaggataaggttgtgaaattcccggacaagaaccgtcatcaggtatttattgagccggaaggacttgagacgaatgaaatgtatgtcggtggaatgtccagttcacttccggaagatgtccagtatgcaatgtacagaagtgtaccgggactggaacatgcgaagatcgtgcgaaatgcgtatgcgatcgagtatgactgcattgatgcgagacagttgaagagtacattggaattcaaagagattgaaggtctgttcagtggtggacagtttaacggaagttcaggttatgaagaggctgcttcccagggactgatcgcaggaatcaatgcggcgagaaagctgcagggaaaagaaggtatcgtgatcgacagatctcagggatatattggagttttgatcgatgatcttgttacaaaagagagtcatgaaccatatcgtatgatgacttcacgcgcggagtacagactgcttctccgccaggataatgcagatatgcgtcttacaaagattggttacgaagtgggactgatcgatgaggagagataccagaaactgctgaaaaaggaagagatgatcgagaaagagatcgagcgtgtggagcacacaaatgtaggtactacagaagctgtacaggcattgcttgaatcctatgaaagcacaccgctgacctcaggaacaacacttgcagagctgattcgcagaccggagttgtcttatgagaagattgcaccgatcgataagcacagagaagaactgccatatgatgtaaaagaacaggttgatattaatatcaaatatgatggttatattaagcgtcagatgcgtcaggtagagcagtttaagaagcttgagaacaagagaattccagaaaatattaattatgatgagattcagagtcttcgtcttgaggcaaagcagaaactgaataagatccgtccgtcgtcaatcggccaggcatccagaatctcaggagtttcaccggcagatgtgtccgtgcttcttgtatatttgagcagtaaataaatggttagttaaatcaatacatgagaatttaaaaatgctatattaatattccgcggaatggtattgtaggattggtgaaactgttccgttggaagtaatgattggagaatagagtgggagagaacgcacagagtaaatttgatctagaattagaaaaaatcggaatcacattaaatgagcagcagaagcagcagttcgacaagtattatgagatgcttgttgagtggaataaagtgatgaatctgacagggatcacggagtatgatgaggtgaatctgaagcactttacagatagtctgacaatcgcaagaacacaggagatgcagaaggtgcagagcgtgatcgatatcggaacaggagctggtttcccggggattcctctgaagattgcatttccgcatctgaaggttgtacttcttgattcattgaataaacgaattaagttcttagatgcagtaattgaagaattaggattggaaaatatcagtacaattcatggaagagcagaagattttgcaaagaaaaaggaatacagagagcagtttgatctctgcgtttcaagagctgttgcgaatctgtcaacattgagtgagtattgccttccatttgtagctgtaaatggcagttttgtttcttataaaagtggagattctgaagaagaaatccagcaggcaaaacatgcgatttcactgttaggtggaaaagtaaagaatgtggataagttccaattacctggaaccgacatgggtcgtgcacttgttgaaatcaaaaaaacaaagcagacaccgggaaaatatcctagaaaagcaggattaccggcaaaagaaccattaaaataagcaaatataggaggacctgtttactggcattctggtgaacaggtcttcatttttgagtgtattgttgaaaaatgccgaaatagtcagaaaataagtctaaaaagaagatatcctcaaaaaaagaaggagttatccacattttccacatgagatattcactctgtgtggatatctcatgtggaaaatgtggataactctaatttttagaaaaaatatgatgtgagtaaaatttctaatttatgcgatattctattcacattcttcagcgtctgacaagaaaatttctacattttcaatgaattcgtcacatttttcaatatgaggaagttgtttggtcttggccattcctgcaatttcaatcgaaggaagatagttctgatattcactggctgccagagaattttcaggattactatttcctacaataatggagatgctgttatttaatttattcagacagtgaagaacatttgcattcgtatatctcgtcttttgacaggcgaaaagatatttggaatttgtatgttctttgtgtgctgcttcaaagtaggtgagaatatctttttcactaatttcattctgagtataataagaagagcagagggcatgagcaattgtcttcttatttacatacatattatagataaatgtacccagaataggagaatagaggatattctttatgaatttactacgttttgtaggaatctttgccaagcctaccaaattcggtggatttatcataataactttatttataattgtttcatcgtttgcacaggccatcagtacaaatggacaggattcaccagaaacgattacatcagttttttctccgataatatgtttgataaagttcgtgattaattctacatacaaataattagtatatgttaatcccggacggtcggaacaaccgcagcctaaaagatcaattgtatatacagtatgggatttggcaagttcctctatattgtttctccattcataggaagaagaacatacattgagattatgcactaaaagtaaaggtgatccttcaccagttttcttatatgcgattttaccgaatctccagttatagtattcatattcatcagaattgattaatttatcagcagttgagatatattctaatacacggttggcaatatgcattgcaccgagagaaactcctgctaaagtagtaaaaaaagttagttttttcttgatactcaaattactcaccttccttattataatagtggttttttatataaaagtaagagtttgaattaaaggaaactcttactttattatactacattcttaaattcaaataaagcgaaaaaatcttaatgtttaattatagaagaagtggcttatctcttacaaatgtttcacgtgaaacatttttgatctgcacaatcgaatccgcaccctgcgcgtgtaatatagttatttacgaaacgtagtactagaaatagaagagaaaacacaatgtttcacgtgaaacatttgattagttctagattaatgaaaagaaaggtgatataataatgaatgtccgagagaaaggagtaaaaataatgggtagagtgatagcaattgcgaatcagaaaggtggagttggtaagactacaacagcaatcaacttatcggcctctttagctagttcgggaaaaaaagtgcttgctatagatatggatcctcagggaaatatgtccagtggattgggcgttgataagaatgaggttgaaaagacaatttatgaacttattattggtaagtgtaaaattgaggagtgtatttgcaaggaaccaatagaaaatctgagtgtagatgtgcttccgtcaagtattgatttatcagccgctgagattgaactgattggcgttgacaataaggaatatattttacgagatgaagttgaaaagataaaagacaattatgactttataattattgactgccctccggcattgagcatgcttacaattaatgcaatgactacttctgactcggtgattgttccaattcagtgtgagtattatgcactggaaggattaagtcaattgatgcatacgattgaacttgttcaggatagactgaatccgaaacttgaaatggaaggtgtcgtatttacaatgtacgatgcaagaacaaatttatcattacaggtagtggaaaatgtaaaggataacctgaaccaaaatatttataagacaattattccgagaaatgtccgattggctgaagcaccaagttatggacttccaatcaatctgtatgatccaaaatccaaaggaacagagagttacatgcttttagcagaagaagtgattaataaaggagaataagtatgcctgtgaagaagagcggacttggaaaaggattggatagtctaatcccaaacaaaaacgttaaaagcgcaaaaccttctgtaaaagcggacgagaaaaaggcagctccgaaagaagaaattttagaggcaggaccgatcatggtgaagataaataaagttgaaccaaatcgggaacagccacggaaagattttgatgaagatgcattgatggaacttgcagattcaattaagcagtttggtgtattgcagccgattcttgttcagaagaagaaggactattatgaaattattgccggtgagagaagatggcgcgcggcaaagctggcaggattgaaagaagtgccaattatcgtaaaagaatttacagagcaggaaattgttgagatttctttgattgagaatattcagagagaaaatctgaatccgattgaagaagcaatggcttataagagactgttgaaagaattcaacttgaaacaggatgaagttgctgaacgagtgtcaaagagtagaactgcggttacgaactcaatgagattattaaaactgaatgacagagttcagcagatgatcattgacgatatgatcagtacaggccatgcaagagctcttctggcaatcgaggatgaagagcagcagtacatgcttgccaacaaaatctttgatgagaagcttagtgttcgcgagacagagaaactggtgaaggctctgaagaatccgaaaaaggaagaaaaaaagccggaagtagaaaatcagttcgtatacacaaatcttgaagagcagatgaagagtctgatcggtacaaaagtaagtgttcatgcgaaagcaaatggaaaaggaaagattgagattgagtattactcaccggatgatctggaaagaatctatgagttgctcatgacaatccagcataattaaaaaggagatggtagaagtgactggagtatttggcaatctgggaattgatccattctacgcatttcttattttacttattttgcaggtagccttgcttgtcgtacttgtgttagtgtatgataagtataaacacctggaaaaagtatttaatacctttatgaagggaaagaatgggaaatcactggaggaatccatttttgaacggtttgacaagatcgacgaagtcgtagatcaggtagaagaaaaccgtgaggagattgcagaactttataataaaatgagaacgcattaccagaaagtcggaatcgtaaaatatgatgcattccatgaaatgggaggcgaattaagttttgcaattacaatgttagatgaaaacaatactggatggattttaaatataatgcatagtcgtcagggatgttatgcatatgtgaaagatattgtaaaaggtgagagtacaattcagctggcagaggaagaaagagaaagtcttgagaaagctatttttcaagaaaataaatagtaaaaaagaaattagacaggaaagggtaaataacatgttagacatcaaatttgtaagaaataatccggatgtagtaaaacagaacatcaaaaataaatttcaggatgagaagcttccacttgttgatgaagtaattgaactggacaagagaaacagagaaatcaaacaggaagtagaagcacttcgcgcagagaagaacaaagcttctaaggaaatcggagcaatgatggctcagaaaaaaatcgaagaagcagaagctctgaagaagaaagttgcagagagcaatggacgtatcaatgaactttccgaagaagagaaagaagtagaagataaactgaaaaagaacatgatgattatcccaaatatcatcgatccatctgtaccgattggtaaggatgatagtgaaaacgtagaagttgagagattcggtgagccggttgttccggatttcgaagttccatatcatacagagattatggagtcattcaatggaatcgatctcgatgctgcaagaagagtagcaggtaatggtttctattatctgatgggagatatcgcaagacttcactcagcagttatctcttatgcaagagatttcatgatcaacagaggattcacatattgcgtcccacctttcatgatcagaagcaacgttgtaacaggtgttatgagtttcgctgagatggatgctatgatgtacaagattgaaggagaagacctttatctgatcggaacaagtgagcattctatgattggtaaattcattggacagacactggagaaagatcaggttccacagactctgacgagttattcaccttgcttcagaaaagaaaaaggtgctcacggaattgaggagcgtggagtttacagaatccatcagttcgagaaacaggaaatgatcgttgtctgcgaaccggaagaaagcaaagaatggtatgaaaaactgtggaagaatacagtagatcttttccgttctatggatattccggtacgtacacttgagtgctgctccggagatcttgcagatctgaaagtaaaatctgttgacgtagaagcatggtcaccaagacagcagaaatacttcgaggtaggaagctgctctaacttaggagatgctcaggcaagaagacttggtatccgtatcaaaggagagaacggaagctacttcgctcatacattaaacaacacagttgttgctccaccgagaatgctgatcgcgttccttgagaacaatcttcaggcagatggttctgtaagaatcccggaagttcttcagccatacatgggtggaaacaaagaaattacaccaaagaacaaataaagaaatataaagcaaataaaatatgcatcagtatttaaaagcaattggatttgaaaatattcaaacaagaaaagatctgaaaaagctcttaaaagacgtagaagagaattttacgcatcagacaattgtatcctacagaccgggcgaagatttctgcgaattccagaaagagttcggtcaggatgtagggatcacactctgcggagaacttgatgatgaagaacattttgaagctgtatattatttcccatattttgaggggagcggagttacaacttatgcagaaatcgatgtgcagagaaagattgagaaagaacagtatgttggtctttgtgaggattccaagattggaatcagtctgatcttcacactgcagaatggtgtggaatatatgcgggagaaacaggccggtcttacaaaggatgtgcagacatctgtaacattttcaggattggcacaagatggaatgattctgcttccggtcaataaaaatgagcaacagattttaaatgaaaagcgtgcgtcagatacaagaagagaattgatgaacgcagcccgcaagggagaccaggcagcaatcgagacgctgacatttgacgatatggatctctattccaaggtgtcaaagagattggcgaatgaggatgtattttccattgtggatacgtatttcatgccgtttggagcagaatgtgatatgtattcgatcatgggagaaatcctggcggtgagagagaggatcaacagaatgacaggtgtgagattgtatcagatgcgcctgaatgtaaatgaactgacatttgatatctgtgttccggcagattccgtgatgggagagccggagatcggaagacggttcaaaggtacgatctggctgcaggggtatattaatttttaaaaatgaagagaaattgttgctgagtgcacgcagtgtgaaaaggaatgggaaatccacatccggaatgtgaaaaacattaaataaatgtggaaaaaagattttatttaacagaagaatgtggataacgaaggcaccatctctggctgaaaagtaattcggtcaggagatggtgtcttttacaattcgtgccatttttaccatgattcgtgacagaagaattgaaaataacagcgctttttttataataaaaatgtaacggttcagagccaacctccaaaatgctacgcatttcgtcggtgtggcgtatccgccaaataaaatttcaaaaacagtcttaaaaatgcaagcattttacacctgttttatgaaattctgcttggctctgaacagttacagattacgagaaaaaggaggcagaataatatgaaaaagcgaacaattcttttagcatttattatatcagcagttgcagttacatcaggctgttcagcgaatgaaccaaagacaggtgaggtgaaacaggaacagacaaaaacagaaagcgtaagctcaggagtaacgataaaaccgcttaccaaaaaggcaattgatgagaatccttatatggcaaaaaatgatgcgaatatccaccatgattgttataattcagattcaacagatgaggtactgcctgttggtatttacccagaaattaatgtttcttatgaaaaggtgaatccaaatgcgtctccggcggtattttttgacaattatggacattcagttgttccgttgttgggaggacttgcaattcgtgatatcaatgcagaagaaacacagacgatcggatatttctcaccaaaacagcatgacggtggaggatatgtgatacaaagttcctattcctttgttgatgaaaataatcgtctggtgtgtccgacaagcaacaatcatgtacttatgttgaaagcaacagacgaggaaggaaatgtgctgccggaatttgagaaagtgctggatattgatattaaagcagcagcagaggcaattaccggaaagacattggatcagaatttattatccgtagtgtttgattatgagggaaatctttggtttgcaaccggcggattcagaatctatccggaacgtcagcagcaaggtgcgatgggatacatttccagagacgcgatcaacgcaattctgaatggagaagagattgatctgacagcgtctacttttgtatatgaattaactcctggagaaggggcagaaaatggaatagcttcttcgaaagagggtgcagtcatcttaacaaatcagaactgctatctactgaaagcagataatggtgtacaggtagaatggtgtactccgtatgaaagtgcaggggcaaaagacagcaaagaaggtgatgaaacgaccggaggcggtctggcgtggggaagtggatgttcgccatcactaactagcaatctggtcatgtttacagataatcagaatccggtgaatctgctggcattagatatgaagacaggtgaaaaggttgcaagcacgcctgttattgatgagctgccggaagaaatgcaggtatccgtagaaaattcagcaatcgtatatgataacagtgagggtacagtcagcacaatcgtatgtaactggtttggagcaggaagtgcgaagcttgcggacgcagataacgattcatctgtacagacatatgaaaatatctatgatgtaaactggctgcagaaaggaaataaaatggtcatgccgggagttgagcgtgttgatacgatcaagacagatgacggatatgaaatgaagagtatctggtgcagagatgatatccgggatacatcgatgatgaagctttcaaccgcaacaggatacatttacggttatgttcagggcttggacagtggcatgtggcagtttatcatgatagattttgagaccggtgagactgcattttcaatggatgtgtcagacaaaccaggatataacaatatggcaatcggtatgtatgcgggaaacagtggaaatgcattatactgtccaacaggatatcttgaactcctcagactgcaggatcggttcgtatatcttccggaaatgccttaccgaaaagtggatttggacaaggcaatgcgaaatatattaacgcaggaagaatttacggaagacggaggtatgggcaatgtcgcaggatggctgaataagataacagtagaaaatgtacatccaagtacgactgtggcgatacgaatgaaggggcttgcaggcaaaacggatgactttaagctgtatgcttatggaaaagacggtaagctgacagaggtttcggaagatctgtggaagattcagacagaagatggaacgattccagagaaactgtcggaagataccttgtatgaagtacatgttacagtagaggatggaggaacattcgatcttagtgaaacagagaaagagattaaaatagcagtagtattaggaaagtaaagaaaagcaaacggggatggagaaagtagttttctatcctcgtttgcttttctttctatctattcagttacttccaggcaagcttctttcgtaccagttccgccacggcggattccggcgaataaagagcctgatatattatgccatacactgaagatcgctcccggaagcgttgccagtggattagctgcaaaattagctgttgcaagagaaatcgcaagaccgctgttctgcattccgacttcgatcgcaatcgcagtagctttagcatattcgatatgtaaaagttttgctgctccaagtccgatgcccattccgcagagattgtgaagtgccacaactccaagtacgagcagaccacagcttaagattttttccgcattaacagatacgattccactgatgatcattacgatggatacaacagaaatcagtggaagtacttctgatattttctgaatctgctttccaaagatccagtttatcaaaataccaagaagcaccggaatcagtacaactttcacaacagaaattaccattgcaaggaaagatacttctacccaggcaccggcaagcagatacactaataacggtgtcatcagtggggccgcaagcgtggaagtgatcgtcattccaacagagagtgccacatcacctccggcaatatatgtgatcacattacttgctgttcccccaggacaacatccgactagaataacgccgagtgctagatctgtcggaagatgcatcagctggcataatccccatgccacaacaggcatgatcgtgtattgtgccacaaatccgataatgatttctttcggtcttgaaaaaactctcttaaaatcgtccatcttgattgtaagtcccatgccaaacatggcaacacctaaaaagatggatgtataattggttgtccacgcgaatccatcgcgccagaaaaatgcgatcacagagaagcagatgataatgattccaatatattttgtaagaaaagaactggctcttcctacttttttcatcacattttccataggttatacctcgtagctaaagttgtcgatcagtctggtttttccgatgtaaactgccatagcgaccagaacgtctttttctacgatttctaccggctgcatatccagtgcatctaccatagatacataatcaatctttgcaagaggttcagcttcaatgatctcgcgcatctttgttaatacttcttccgccttgattcctttacaaattgtttcctgacctgcctttacagctcttgaaagacaaagtgcggcttttctttcttcttcacttaaatatgtatttctggatgatttcgcaagtccgtcttcttcacggatgatagggcatcctacgatctggatatcaaaattcagatcctgtaccattttgcggatgattgccaactgctgtgcatctttctgaccaaaataagccctgtccggtgttacaatgttaaataacttagaaacaacggtacatacacctttaaaatggattggtcttgtcttaccgcacagtgtctctgataaagtatcaatacttacaaaggcatgtggatcatggtacatatcctccggttccggatgaaagatgacatcggctccaaggctctcgcagagttcgctgtcacgtttaaaatctcttggatatgcttccagatcttctgtcggtccaaactgtgtcgggtttacaaaatcagatacaacaacgatatcattttcttcgcggcatcttttgatcagacttgcgtgtccttcgtgcaggaatcccattgtcggtacaagaccgattgttttcccttctcttttccagttcttaattaaatctcttgtttcctttactgtttttgttacctgcatggtgttctccttttaaaacaaaattaggagatagcctcttgttctgaattcaacaaatttcattttcatttataagttacaatcacttttgcagttatgccatatctttcagtaatccgtgtttctcatagtttgtaacacggctgatcttattctcctcatctacaaaaacaacttgtggtttatgttctttggcttcttcagaatcataatgtgcataacacatgataataatcttgtcaccagtacttacgcatcttgccgcagcaccatttaagcagatcattccgcttccgcgcttgccgcagatcgtataagtttcaaatcggcttccgttatttacatccacgatctgaactttctcatattccataattcctgccgcttccagcaggtcttcatcaacagtaatacttccaacatagtcaagttcggcctgtactactgtagcacgatgaatctttccttttaacatctcaactgtcatttcttattggtctcctcacaaaaaaaagcattcgtcaaggtatactgatccctgcaaatgcttttgctattcttcgtattccctgagtcttattttatgtcttaaataaatataagctcgctttccgccacttcctggcggggtaactgttcaatatgaaattgttgtgattcagtcagagtatagttttgtagtattccaaatactatctccgcaagtattatgacaccctgtgaaaggaatgtcaatatggttgcgcaatatgcgttgttggtcgcacaacgtgtgaatattatgggctgcttctccatgaaaggacgattggatgattataaatgggccggtccgtatatggtcagtaaccaggtggttgcagtcaatgagaacagtgatatctataccctgagtgatctggaaggaaagacacttgccgtacaatctacaacaaaaccggaaggaatttttctgaaaagaacagacagcaggattccaaagcttggtaatctgattagcctggaacacagggaactgatctatacattccttggaaagggatatgcagatgcaataggtgcacatgaggaatcggttatacagtatatgaaagattatgatgcgaaattccgaattctggatgaaccacttatgacagtcggaatcggagtcgctttctcaaaaaatgaaactcgggatctgccggagaaactggagcagactctggatgaaatgagagaggacggaacttctgcaaaaatcataggaaaatatcttgatgacccagaaaaatatctggaggtggaccagcttgaagaagaataaaaaatctgtcccaacagaaaaaaaattctggatcatcagtatagctgttgggatatgtcttgtcgtgctgtctgtatgttttttcagcaatgcagacaaagaaaagaaagaggctaatcttttagacacggtaaattatgtaaaagtacaatgttccacatatacacattataatgaatcatcagaatccaaaagtctgcttcgtgccattgagggaacccggcaggtcagcaaaaatatagccgcagaaacagagaatgaaaaaacactggatgatcagctattgaaagaaagtgcagagcagttatggctgacgggaatcgtggttctggatacagatggaactatagtatgtgaatacagtacgaacgaaagtttattgccggaaataaaagaatgtgcagagaaagaaatcgtactggatacagcaatttacgatgaaaaagtgtatgccaagagaatcaatcataatgacggggcttatattgatatggctgcctgcacaagaaaggatgcaccgggagttgtagtgacttattattatacttctgcagagtatgcaacgaattatacgcttacgatacagagtttgttgaatggctatcggaaggaccgggatgggacaattatcgtagcagatgaaggcgtgatcattgcttcaaacaataccgggctgattggacaaagcacaaccgattatgaagtaatccaaaagctaaaaaatcatgcagacagtaggcacatgatgggcttaacgatcaatggagtccggtgtcacggtgttatgctgaagcagagagaccattacatctatgcttacgttccggattcgatcatatttcagacacttctgcaaaatgtgatcatgtgcctgttcatttatctgattgttgtagcactaatctggatgatttacagaaaatcacagaaaaacactctcataatagaaaaggaaaaagaacagaagtatcaaaaaagcctgatgaaagagaaatcaaggtggaacataaaacaccagagatcattcataaagatcttataggcagcccaatccatctgaagcgtcttctgatgaatatcttgagtaatgccgtaaagtataataaagattatgggaagatttatttgagtgccagagagattccttccgatcaggatggaattgtgacttttgagttcacatgtcaggatacaggaattggtatgagtgaggaattccaaaaacatctgtttgagctatttgcgcaggagcagaaaggcggagcatctaagtttggcggtaccggtctgggaatgccgatcgatatgaaactattagtggagattattgctgaattagcaggaaaaaataaaaatcgtgaggataaaggatgagtgagaaacaaaaactacttattgtagatgattcagaacttaacagagatatattaaaggagattcttggaagcagatatgactacatggaagctgaaaatggaactcaggcgatccagattctggaagtgcatccggagatcgacctgatgcttctggatatcaatatgccgcagatgaatggattccaggtgttggaacatatgagggagttacagtggattgatgaagtcccggttgtcatgatttcatcagaagaatctgtcgaaattatgcgaaaagcgtatgatctggggatcacagactatatcagccgaccgtttgatgcagttatcgtaaagaaaagagtccagaatacattgggactttatgcaaaccaaaaacgactgatcaatgtggttgtagatcaggtctatcagaaagaagaaaacaacacgattatgattggaatcctgagcaatgtattaggttctcataacagtgaaagcagcgaacatatattacacatccgtgtcgcaacggagatgctgttgagaaaattgatcaggaaaacagatgcgtatcatctgacagaagcggagattgctctgatcataacagcatcttcccttcatgacattggaaaggtcagcattccggaagaaatcctcaataaaccaggcagactgacagatgaagaattcaagatcatgaaaagccacagtgagattggagcgtctatgatccggaatatggattttccacaggacaagccactggtacgcactgcatgggaaatctgccggtggcaccatgaacgatgggacggaagaggatatccggatggactaaaaggggaagaaataccaatctctgcgcagatcgtgtcaattgctgatgtgtatgatgcgcttacaagtgtacggtgctataagaatgcatatgatcatgatacggcaatccagatgattctggaaggtcagtgcggacagtttaatccgcttcttctggaatgcctgaaagagagcagtcctcagttgtccagaacatttaagaaagaaaaggatgacaacagagagtattatgaagcgcagaggatctcagaagaaatactgaggcaaaatgcattgccatgcaaggattattcccagcgtgttatagagagcatgcaggaaaaaataaagttctttaaggagaatagcggtaagatttcaatggagtataatgcgatttcaggaaaactggttttaacagacggagaatcgcagaaagagtatcagagagatcttccgggatttgattcatatggagtatatgatataagcgaagaggatattcagcgcgtaaaagattcgctggattcagtatcaagtaaaaacaaagaagtttcaataaaagtaatgttaaaagtaagaggtgaaaggcagatgtgtgatctgaaactgcacacattatggtcatcaataaaaacagatggatatatcggaattgtcgggcagttggatattgtgaagtaatgtcacaaaaatggaagacaaaataaaaagagtcacagttgttccctgatggaacaggctgcgactcttttctgttcagatattcaagcagctgcgtaaagtgttctgtagagcttcttcccgcctaaaaggatcttacctttggacggtatctcatatcagacactgtatacactgtcacgaatgcttccggatccttcttgataatataattcatcagtttctgatattcacttttgtccacgatcgtaatgatctctctgtgcttctgcatattatatgcgcctgtcgcctcgtagaatgttgctccgctatgcagttcatgcaagataaactgacggacttcttcttcgtattttgtaataatacatacacgccgtttcagattctggccaaagataaaatgatccagcacaataccattaaaataagttccaagcacacttaaaacgacagctttcttgtcatagatcagagcggaagaaagtgccacacacatgcccgagatggacattgcttttcctaattctatgtgcagatatttattcatgatcttcgctacgatatccagtccgccggaagatgcattcatgttaaataaaatactgaggccgatacttacgaccaggatatagcatattacatccagttcactgctgtttgtcagcgaggtaaaatccggaaatatgtgttcaaatactgcaagatacaacggcagcaggatgctggtgtaaaccgtctttgctccgaactcctttccgcatgtcacaaagcctatcagcagtaggacaacgttcaatatcattgtgatcgttgacacatgcaacggtatataatgcgacataacaattgccagcgcggatatactgctgatcgaggtcatactcggaatcaaaaagaaatatacggccgcggcgataatgcccactgctatcgtcatgatggctgtttctttcaacttgtcggatgtgaaaatctgtttctcttgtttgttcatttatcattccccatttttagatacttagtattcagaaaaatcagataccagtatttatattatatctctaatatattcatggagacaatggttaattttatcagtcgcaattacagcggtcttgcagtttgaaattgcaaacctttatgtgacaaacctaactgcctatgatattataaatttgatataagcgaaaatgacttttgcagaaacgaaagtatctgagtacaaataagcaggaaacagtattgtaagaaaacaagaacacaggaggaaggttttatgattcggcttcaggatattgcagatatggcaggcgtcagccgcaccacggtatccaatgttataaatggcaatacgaaaagagtttcccagaaaacgatcgataaaatcacggctattcttaaagaacagaactatgttccgaatatgggttccatgatgctttccggtcatggttccagaattataggcgtagtactcggatttacttacgctcatggtatgcagtcacttcaggatccattcgtgggagaactgattggaacgattcagatggaaatggaagaaaatggatattatgttatgcttattggcggtgaaagcattcagaatgtagtggatattgcctcaaaatggaatgtagagggattgattatcctgggatacaatgaagagcagtatcataacctttcgcacagattaaacaaaaaaatgattttgatcgatgcttatccgaaggggacttatacatttcagaatgttggtatagatgattattcaggcgggtatcagatcggagaatacctgtattcctgtggatataagaaagcattgtttgttgcagaaacagagcaggacagcgattactatcggtggatgggattcaaacaggcgatggaaaaacaagggggattctgcagtcgttccagatatatagttattccgggtaaaagaaatcttcgtctcaggaaatacagagaacttcttccacgctttcttgaagcaaaagcgctggccttttcttcagattataatgcgatagaagcaataaatttcttttttgacgaaggaatcatggttccggagcagatttctgttacaggatatgatgacagtgtttacgcgagcatgattcgaccgaaactgacaacagttcatcaggatattccacaaaaagcacatgtggcgttggaacgtctgatgaaattgattcagggagagacgctgaacgaattaaatataaaaaacccagtctatctggtaaagagggattctgtcaaagaatgacaggattctttttttgcatatataggcgagcaggtgcaataacctgtttttctttgtataaactgtataaaagcaggaaataaactttgttaccttttgtggtttcgcgagaaacctcttgatactgcaaggatgaggtgagtataatgaatggtgtggttgcaggagcggtcaaataattagaaatgaggagacttggcatggagaaaaaatggtggaaagaaagtgtagtatatcagatatatcctaagagttttaaagacagtaacggtgatggcgtgggagatattagaggaatcatacagaaactcgattaccttaaagaacttggggtaaatgtgttatggatttctccgatgctggaatcacctcaggacgataatggttatgatatttctgattaccgtagaatttatgaagaatatggaactatggaggattatgaggaattgttgtgtgaagcacacaaaagatccatcaggattctgatggatctcgtagtcaaccatacatcggatgaacataactggtttattgaaagccgcaagtcaaaagataatccatatcgtgattattatatctggaaagacccggtaaacggaaaagaacctaataactggggcggagcattcggcggttctgcatgggaatatgatccgcagacacagatgtattatctgcatctgttttcaaaaaaacagccggatctcaattgggaaaatgaaaaagtacgccaggaagtttacgatatgatgaaattctggtgtgaaaaaggaattgatggtttccgtatggatgttatcagtatgatttccaaagatcagagatttccggatggagaaatgaataacggactttatggcgattttggaccatatagcgtacatggtccaagagtccatgaatttcttcaggaaatgaatcatgaagtcctttcaaaatatgatatcatgacagttggtgaaacagctggggttacaattgaagaagcacagaaatatgcgggtgaagacagaaatgaactgaatatggtattccaatttgagcatgtggagagtggatgcggagattatggaaagtggacaactcaaaaatatgattttaaagagtttaaaaacatcatgatcaaatggcaggagaaactccagggtaaagcatggaacagtttgtttttaggtaatcatgatcaaccgagaagcgtcagccgttttggaaatgacaatccggtatacagagaaacatctgcaaaaatgctggctacctgtattcacatgatgcagggaacgccatatgtataccagggggaagagcttggtatgacaaatgtttattttgacaaactggaagattaccgtgatattgaaagtattaattactttgaagagtttactgaatcaggtcttatgactccggaacacatgatgaaatgtctgatgctgagaagccgtgacaatgcgagaactccgatgcagtgggatgacagcaaacaggctggattcacagatggtgagccgtggatcaaagtaaaccaaaactacaaaaagatcaatgcagcacagcagcttgaagatccggattctgttttccattactatcagaaactgatcagcttgcgcaaagagaaagacattattgtttatggcgaatttgaaccgctttatcgtgaagatgatcaaatttttgcttacacaagaaaacaggatcaggaaaaacttctgactgtctgcaacttcagcgacaagaatgcagaagtagaagtgccggaagaattcaaaggcgcagagtgtctgatcacaaaccttggaagaaaagaattcgacggaaaaattattctgaacccatatgaagcatttgtattatattataaacaccaggtgacagagaaatgattagaaaatatagatatggaactccgtttaatacggaggcactgactgaaaaaattgaaacaactgagggcgttctcccatatggagaggtcagccaggaggaaggatttgtttttacttatatcatggatgaagatgacattgtctatggtctgggtgaagccaatcgtggaatcaacaagagagggtattgttatatcagtaattgcacagatgatccggtacacacagaggacaagcgttctttatacggagcccacaactttattattgtgagtggaaagactacgtttggattgttttttgactatccgtcgaaactgacctttgatatcggatatgacagagcggatacactcagggtatcctgcgaaaatgccgatctggatatctatgtgcttgaaggtgagaatgcatatgatatcgtaaaacagttccgccacgtaatcggacgcagctatatcccgccgaagtttgcttttggtttcggacagagccgctgggggtatacgacgaaagaagatttccgtactgttgcaaaaggatatcgggagaatcatatcccaatcgacatgatttacatggatattgactatatgcagtcattcaaagatttcacagtgaatgaagaaaatttcccggattttccagaatttgtgcaggaaatggatgaccaggatattcgcctgattccgatcattgatgccggtgtcaaggttgagccgggatatgagatttacgaggaaggtgtcaaaaacaactatttctgcaagagagaagacggaagtgattttgttgcagctgtatggccgggagatacccattttccggatatgctgaatccggaagccagaaaatggttcggggacaaatatcgttttctgatcgaacagggaatagaaggtttctggaatgatatgaacgagcctgcgatcttttattcttccgaatgccttgcagaggcaaaagaacttgccggagcgtttgcaaaggataccgaaggcaagaccaatccctgggaaatgcaggacaagatgctcagtattgcaaataatccggaagattacaaaagattttatcacaatgtcgatggcaaaaagattcgtcatgacaaagtacataatctttttggctacaatatgacaagagcagcaggagaagcttttgaacgcattgacccggaaaaacgttttctgatgttttccagatcttcttatatcggaatgcaccgttatggcggaatctggacaggcgataataaatcctggtggtcgcatatccttcttaacctgaagatgctgccgtctctgaatatgtgcggtttcctgtatacaggtgctgaccttggaggatttggcagtgatacgacaagagaactgttgcttcgttttcttgcacttggtgtattcacaccactgatgcgtaatcattcagcaacgggaacaagagagcaggaatgttatcaatttgagaaaatcgaggatttccgcgctgtcattaatacaagatatcgtcttgtgccgtatctgtacagtgagtacatgaaagctgtgctgaatgatgacatgtatttcaaaccacttgggtttgtttatccggatgacaagagagcaatcaggatagaggatcagctgatgcttggaaacgagatcatgatcgctccggtctacgagcagaacgcaagaggccgttatgtttatctgccggaagaaatgaaatttatcaagttcctgccggacggaagcatttctgaagaggttctcgcaaaaggtattcattatgtagatgtggcactaaatgaagtaccgctcttcattcgaagtggtaaatgcatcccggttgcagaagcagcagagtgtgtgaaagatattgataccgaacatctgcagcttatcggatataaaaacagcagttatacgatgtatgaggatgatggaatccacaaggattacgataaggaagagaattatcgggtattcacaaattaacttttgacaaagattagcaagaaaaaatatgtaaacggtagggtagaatataagtaccgtgatgaaaaaggatggtcaaataagtggccatcctttaaaattgcactgttttctcattatcattgaacgaaaaataactaaaagaaaaacactattaacgatcgatataacaaataaaatcgcggaaaacgaataaaaaattcggaaacgaagaaaaatattgaagaaattaatgatttatgatatcgttatagtcataacgtatagtgtggcaggatagttgtaaggagaagaataaagatgaaaagaccgattgttcgtttgtcatcattacaattgacaaatattaaaaatgtaaaaaatggaactatatatatgccgaataccgtaaacaaaatattatcagcggacaaagcagaaatactggggatttacggacaaaatggttcaggaaaaacagcgatcgtggatgccttatattttttacaaaaagtaatggtgggagccgatttggatcagtcattagaagattacatgactatagattctgatactgctgaaatttttgcagatttcaatatttttatggatggtattgtgtttgaaatagggtacacattaagccttagcagagaagaaaaagagattgttattaatcgggaaatattgagatccgcaaagaatgaaaatggaatcagaacaaataagactatattcatggattatcaaagagatcaaacggatgttatttttaaaccacagaaaagactggatgaaattctggaagccaataaagaaataaaaacagatttaattgtagcacgcaaaatggcagagaaaagtaactgttcttatatttttggtgaaagcagtcgggaaatattctgtagagaatataaaaatggatttcaacagttttcagttattatatcttctttgtttgaatttgctttgaaagatctatttgtgattcgcaatacacattcaggagtgatttctgctaattttgttttgccgatggcttttcggattgaaaatgataatatcggagcaaaaggagattttgcagttcctttgacagaaccaatcctggtggatgaagaaagaaaaaatctgttagagacaattgttgaacagattaatattgtgttatacacaatcattccgggattgcaggtaacgattaaaaattatgggaaacaatcattggataatggagaagaaggatggaaactggaattaatgtcaaagagagagggcatgaaagagattccaatcagaatggaatctgagggaattattaaaattatttccattctaaatgcactcatacaggcatttggaaatccttcgatttgtttggtgattgatgaacttgattccggaatttttgaatacatgttgggggagttgcttgatattttcaaaaagagtgcaaaaggacaattgctctttacttcccataatcttagggcacttgaaatgattgataaagaaagcattatgttctctactacgaatccagataatcgttatatccatatgaagaacgtaagagaaagcaacaaccttcgcaatatgtatatcagaagcattacattgggcggtcaatcagaacaaatttatgaagaaaccgatagtttgaaaattgccagagcatttagaaaagcaggacggggtgttcgtagtgaatgagaaaaaagtaattgcggttattgtagaaggaccgagtgacgaggccgcattgggatccattttaaaagaatatttttcgagtgaagagattcagtttgtagtagttcatggagatatcacgacaaaggattatacatcagctgacaatatactttccaagattaacaacttaattgaatcagtaaaacaaaaatatggatacaggatagaggactttttaaaaatcatacacattgttgatatggatggagctttttgcaatgatgtaattgtgaaaaaggatattgagggagtcagatattatttggaccatatagaaacgaaatatccagattatttaatccgaaagcatactcaaaaagcagagatattatcaaaactatattcttccgggaaaatcaatggtgtcagctatagaatctattttaattcttgcaatttggagcatgttcttttcgatgaattgaaagattttacagatgaagaaaaagcagatatggctgatgattttgcggaaaagtatgaaggtaaggtagaggattttgttgaatttatttctcaagaggatttaattgcaccaggaacctttaaacaaacctggcgatttatagaaaaggaaaaacattctttagaaagattcacgaatatgcatttgatgtttaagtaataacatctatctgtatgttcctgctttttatctggtagcatgagcatagcaagagccactaattgtttacaagtctaacaagagatggaagtagaacagcgtttagaacgaatgatttatttggcggatgaacgagaagtctcgcaagaggcagaaccccaatctgcctcttgtgagaaaatacccgtttcacctcttggattagtatttaattaatgcaaatccaagaggtttatttatgcttttggagagtgtaaactcatacaatctttatctccagaaatctgttttttgacgaagatcgatgtctgcacttttaaaaaccgggttgattccctgttttaactgtgcttcataatcttgaatcgctttaaatgcaatccctgataaaatcaggataaccggaatgttaatgagcgccataacccccatcagtacatcggaaagatcccacaaaagagacatctccattcctgcgcccagaaagattacaagtgccgataccagtctgaagcctttcataaaagctttttccggctgttttttgtgaatgtagattaaaagattgtcacaatagaaacagtttccgagcagagttgtaaatgcaaaaaataccattgcaactgtgataaagatcggcccgaaagaaccaagtgattcctgaagagatgcctgcacccatggtgctccctgcaattcttttgccggatcgatcccggatgacatacacatcattgctgttgctgtacaaagcaacaaagtatcaataaatacggataacatctgtaccagcccctgttttaccggatggctgacatttgccgaagccgatgcattcggagcggaaccgatacctgcctcattggaatagagtccccggcggattccctgcatcatggctgaaccggaaaatgctccgaaaattgctttgaaatcaaatgcttcttcaaaaatgcgcacgaacattgccggcacgttctgaatattgataattactaccagaagtgaaattccgatatacgcaatccccattaccggcacaaccattgaagttacttttacgatacgtgatccgccgccaagcagacaccatcctgtcagcactgccaaaatcccaccgataatccagggactcatctttgcctcataaaaagaaaatactgaaaatgtagactgcagattataagatgccagcatattaaatccaaatgcgtaggttaaaatcattgcaacgcagaaaacaattgccagcgggcgacaatgaagtgccgcttcaatatagtaagccggtcctccataacagcttccgtcttttccttttttcttataaatctgtgccaatgtactctcgatcagtgcagatgcacttccgatgatcgcaatcacccacatccagaatacagaaccaaatccacctatacaaatcgccgatgaaaccccgacaatatttcccgttcccacacgggatgctgttgaaaccataagtgcctgaaaagaggaaattgcccctttatcctccggcttttccatcacggatccacaagcattcttaaataatcttacctgcggaaatcttgtgcggactgtaaaatagactcccgcaccaatcagtagaatgaccagcagcttgctgtacataaaagaactgattgtaccaataattgtttgaaacataccttctttcctttccctgtttgttgtcaatatattaacggaaagaagatggatttgcaagtttttttacattttagtacttggtttgaaaactgatggaagaataacacgatactgtgatagaataagaaaaatggttaaacgaactattgttgaatgagtaacagcaaaagtaagcatgactggaaagtgcttgtgatcttagggattaagagaggatacagattatggaagattcttacgtattacaactattaaaaccaaagtttaaagattttcatttgtgtttctgcggatttgcagaatgtaagccattacatagctatggaccggccgcaagacccaattatattttgcattatgtaatgaagggcaaaggtatctatcaggttggtgaaacgaagtatcagctgaaagaagggcaggcctttctgatcgagccggaaagccttaccttttatcaggcagataaaacggacccatggtcttacctttgggtaggatttggtggtacggaggcacagagatttgtcagagatctcggactgaacagtcgtcagcttacatgcgagtgtgaatatggagaagaactgaaagaaattgtatttgaaatgcttcatcatacgagttcaactgcagaaaatctttattatctccagggaaagctctatcagtttttctcagtactggctcgtgggattgaaattcagcaatattcgaatgatacaaaagaaagcatacatgtgcaggaagcaattgcctatataaagaattactattcacagaaaatcacagtggaagatatagcaaattatttggcactaaatcgaagctatttatatacaatatttatgaacagtcttggaatctctccgaaagattttttgacggaatttcgaatttccagaggaaaggagcagctcgcacttacagatctgtctgtggaggagattgcagtttcctgtggctatcgtaactcccttgctttcggtaaaatattcaagcagaaagtgggaataacgccgacccaatatcgtaatgacaacagaaaggatgcccgagaacgattgatccgtgcacaaaatgaactgaaagaatataagaagcataaaacaatttatgtaggaaacatcgaaaaagaatagataaaatgttaaaaaaagcatctgatacctaacatttgagatataactcttaacaaaaaggtataacggatgctttttttgtacgctatacttgtatcaacagacataaggaacaagtgcacaggtttcttcacttaaacaacaaataaacaaatgagtgttagaggaggagaatcatgggaaatcaaaaagaaactcagaaaaatccgcaatataaatatgcgtctacaagagaaaaattatgttttggaattggggcaatcggtaaagatgcaatttgcaatttagtaggagcatttttaatgctttattttacagatacattgtatctggcaccggcatttgtcggcgtactgttttttgtggcaagaatatgggatgcgatcaatgacccgatgatgggaatgattgttgacaatacacatacacgttttggtaaattcagaatctggcttgtaatcggaacattggtaaattcagttgtatttgttttgttattccacagttttaatctgtcaggaacagcattgtacgtatatgtatccgttatgtatatcttatatggaatgacttatacgatcatggatgtcccttactggtcatggcttccgaacttgacaaatgacccgcacgaacgtgagaaagtatccgtaattccaagatttttcgcaagtcttgcaggattttcagtagcaacatttgggctttatattatcaactacctgaacaaagttgcaggcgagagcaatctctacgcagaaaaaggatatacacttttcgcaatcattatcgcagttattttcatcgttacaatcggcattactgtatttaatgtaaaagaggaatcaacattaggtatatcagcagaaaagacaagtctgaaacaggcatttcaggtaattgtaaaaaatgatcagctgcttgcatttatcggattacttttgacatttaacctttgtacacagattgcaaaaagctttgctgtatattatttcaaatgtgtatgccatgatgaatatctgtattctatttttggacttgcgattattgctgagatggcaggacttttatgcttcccgaaaatcgcagaaaaaattagccgtgaaaaagtatacgcatttgcatgcggacttccgattgttggatttgtactgctcggtgcagcaggatatgtagtaccacagagcaaggtgttagttattgtatgttgtgcattacttttcttcggctcaggtctttcacttggagtaacaacatgctgtatggcagatgttatcgactatggagaagtgaaatttggtgtacgaaatgaaagtgtaacatgctctgcacagacattccttatgaaggcagctatggcagcagcaggtggattaacaggaattggtcttcagattgtaggatacaacgcaaaagcggtaacgcagagcgcagcaacagtaatggggattcgcgtgttaatgattgtaattccaatcattcttgcatttgccagctttggtatttacaaaaaatactacactttaaaaggtgagaagatggaagaaatcacaagaaaagtaaatgaaatgcatgcgaaaaagcagacagcttaagagtcaacaattcaattataaaaggggtagtatatgagacagattatttttcacgaggaaacgaaaactttccatttatacaatgaaaaaatcagttatatcttatgtgtattagaaaatggacatctgggacaattatattttggaaaacgacttcatgataaagcagatttttcttatctggttgaaaaatgtggacgcccaatgacatcatatatatatgaatgggatcgtactttttcattggaacatatccgacaggaatatccggtttacggtacgacagattacagacatccggcaattgaattgttgcaggaaaatggcagcagaatcagtgagttccaatatgaaagctatgagattattgccggaaaaccgaaactctccggattgccggcaacttacacagagtccgaggaggaagcgcagacattgcgcatcttcctgaaagacgctttgactggtgcaaaactggcgcttttatatacgatttttgatgaatatagtgcaattgcaagaagtgcttatattgaaaatgccggtgagaaaaatctgcatgtattaaatatgatgagcttaagcctggatcttccggataaggattatgaatggatgcagttgtccggtgcgtggtccagagagcgctatataaagaatcgaacattggagcagggcataacagctatcgacagcatgcgcggaaattcttctcacgaacataatccgttccttgctttaaaacgtcacaacacagatgaaaatgcaggagaagcaattggaataagccttgtatacagtggaaatttccgtatgcaggcagaggtagatacacatgatgtgacacgaattacagccgggatcaatccggaaggattcgattggaaattagaaccgggagaaagctttcagacaccggaagcagttctggtttacagtgaaaatggattaaatggcatgagtcagacgttccagaagttgtatgctaagagactcgcaagagggtactggcgtgacaaggcaagaccgattttaaataacaactgggaagcaacttattttgactttacagaagatcgccttgtagagattgcaaggaaagcaaaagaatgtggagtagaactgtttgttttagatgacggatggtttggcgcaagaagaaatgacagagctggtcttggtgattgggtggaaaatgaagagcttctgccaaatggcatcaaaggcctgtcagaaagaattgaagcacttggattaaaattcggtctttggtttgagccggagatggtaaataaagactctgatctttatcgagcacatccggactggatcttacagacaccgggaagaaatacatcacacggcagataccagtatgtactcgattttgcaagaaaagaagtagtagatcatatttacggaatgatggcaaagttattatcggagtcgaaaatctcatatattaaatgggatatgaaccgaagcattacagaatgctacagcagcaaacttccttcagacagacagggagaagtgttccatcgttatattttaggtgtatatgatctgtatgaacgtttgacaaatgagtttccagaagtattattcgaatcctgcgccagcggtggcggaagatttgacccgggaatgctgtattatgcaccacagggatggacaagtgatgattcggatgcaattgagcgtctgaagattcagtatggaacttctatgtgttatccgctcagcagtatgggaagccatgtgtctgttgtcccgaatcaccaggtatttcgcaataccccattacatacaagggcgaatgtagcatactttggaacttttggatatgaactggatctcaacaaactgacagaagaagagatcaaagaagtaaaagaacagatcacatttatgaaagaataccgagaagtgttacagtttggaacattttatcgtctgaaaagtccattcgaaggaaatgagacggtatggatggtgacaaatgaagaccgcacgcttgcaatcgtaggatactatcgtgttttaaatggagtgaatcagccgtatagccgtgtcagattacagggattgaacccggatatggtttatgaaaatgtatggaaccatacagaaaattacggagatgaattaatgaattatggattgatcacatccgatgtgacagctggtgaagtgcctgggaatgtgactccttgtaccgattttgaatctagaatatatatgctgaaaggcaaaaaagttcaggagggaagatagagcatgacgaagacaaaaagaatcagcggaatggtactgggaatattgtttattggattatgtgtatctttcttacgactttcacaatttggcgtggatccattcagtgcaatgaatcttggaatcagcggatttatcggatggagctttggaacgtggcagttgcttgtcaatgcgatcattcttgtagttgtattctttcaggcaagatcctgtattggtttggggaccattatcaatatggtatttgtcggatatattgcagattttatctgttatgtagcgaatgatgtagtgcagattcagatgaatctgccactgcgtatccttgcattgctgcttgctcagctgatggcatctatgggagtggcattatatatggtcgcagatatgggaatcgctccatatgacagcgtcgcaattataatcgagaaactgacacatcaaaaaatcccatttcataaagcaaggattctttcggatgttgttgttgtgattatcggaatcatatttgccactgcatctggggcgggtatctggtcggtagtagggattggtacaattataaatgcctgcttcaacggtccattaattcaattttttaaaacaaaactggagagattttacttgtaaaatctaaggattacaattctccaattcttgcaaggctcatatccagaacggatacgggcctttctttttcaccagtagcttcatccaaaccttcatattgaataatgaacccttctctttggtaaaaagaaattggatatatagcgatagccccttatattttcggaaatcggaaaataaaactcgttccgatatctttgatactttcgacgtgaatggttccattgtggaggtttacaatccagcgcaccatagaaaggccgagaccggtaccgccattttctctggaacggcttttgtctatgcgatagaaacgctcccagattttgtccaggtgttcctcacttattccaataccatcatctttcacttcaccgacaatctggtcattttcgaccttcaggataacatgaatatgtccatttgtttttccgtaattgatggcattggttattaaattcatcatcatacgcaaaagcaatgtctggtcgccgttcataaataagtcgtcctgcttttgcaaggtgatctcaatatttttttcctgtgcttttgtctgcagttcttctattacaagttcgcttaataatccaaaatccagtttttccatcagatgctgctcatcctgttcgtttctggcgatcattaacatttcgcttgtcagctttgacattcgttttgcctgccttaagatgactgcaatctcttccttatcttccgcagataagttatcattttccaataagtactcacactgggaaataataacagcaacgggagtccgcagttcatgggatacgtctgatgtgaattgacgttccttctcaaacgaaaattccaagcgctcaaacatttcgttaaatttctccgacaattcgtataattcatcttttgcttttggcagagacaatcgtttggaaagatcttttccattgctgatgttttcaacttcatcgcagataagatccacctgtctcaatgcccgcttaatcataaaatatccgatggccccgatcagaataatgagtaatgggaatacaatcaacagcattttctcggatgtctgcatgaaaagttctatagaatgtacggaggtaattcctcgtacccacatttcctcatcatcaccgtaagtgtaaacgctgtcatatatcatccattttcgatttgatccggttatcattcgcggtgtattcgacttgaggatagtttcttctggaaattgggttggaatcgttccataaagtaagcgtccgtttttgtcataaatacaaaacataataccgtcatcgtaaaattcggtatcgccgtcaagataaaaggaatcatcctgaaaattaatatttgaagagaaaccagtcactgcggcactgatttcttcttctgtcgcagaaattccaaccttatccacaaaaagaaggacgagaactaaaatagtcccaagaactacggcaatgattccggtgtaccatagcgtaatttttttcttgatcgtcagctgtttcattcgttttccctcattacatatccgacaccgcgaacagtgtggatgagtttttgttcatattgtgcatcgattttttttcgtaaatagcgaatgtatacgtcgatcacattggaaccaccttcaaaatcaaagtcccacgcattctgttcaatctgctgtcttgtcattacgatatttttgttgcgcataagacattccagaaccataaattcttttgcagaaagatcaatttcatttccggctcttgtaacctttcttgtgtcacgatccagaataagatctgctatttttagttgattggatgtaaattgtggctttctacgcatcatgacacggattcttgcaagtagttcttcaaatgcaaatggtttgatcaggtaatcatcggcaccaagatccagtcctttgacacggtcttcaatgctgtcttttgctgtcagtaacagaaccggtgtatcatcttctcgttgccttaattctcttaagatttcatatccgtcctttcccggcaacatgatatcaagaataataccatcgtaggaagtcatatcgatataagccatcgcttccagaccatccccacaggcatctacactgtaatgttccttgacaagcctttttttgacaatgtttcttaaatcattctcgtcttctacaatcagtaatctcataatgtaattattataataccaatcattttcgtctgctagagtcctttttttcattttttgaaattactatttgttttaatctttttttaatcttccccctatatgatacatataacagcaaaaacaaaacatccaagagacggaaggagaacacgttatgaaaaaaatattagtagttttattatctctcacattaatatttgcttttacaggatgcacttcatccaataatggagcagcagaagatatagaaattaagacacaggaagttgtaacatcaaatacagatgacaatgatgataatatcagtaacacagaaaacgcagtagagaatgcgaacgaaaaggattatgatttctcttcttatgaaaacgatatccgtaatataacaaaaagtgtaaacaatgcaaaaacatctacaaatgcatctgagaatcacgaacaattctacgctttgaaaaaacaggtagacgcagtcgatgacgaactggataagcttgacgatgaatttgagtatgcttatcagatgaaagagattagcttcgagacatacaaagcgagagaacgcacgattgaaaaactggaagatgaactggaattagcagaagaagcactggaaaataaatacggcattgatgattaattccatatcgacttcttcagaaaccgacaaaagcaaatgtaccttctgtatgaggtgcgtgtccatatgcccagttcatagttattgataagagagacatttgccctggcgttcatataaatccgttcctaagaagtttagtaaaacatctcttgaccaattgttttcaatagtctttctgatataaaacaatgcctttgcagaatttcctttgcatttatcaagtattattttgttatgtccccatggtattctaaaaatgatttgtaaatcatccccaacttggggacgatttgcatctgtaatcaattcgtcctcaacttgaggacaaattactgcgtcaggatacatctcataaaagtatctcatatataatcctttctactgtgtcagttcgacaattgccgagtttacagtttctttataggatgtctaatgaccgttttccatttttctggggcaacctttcttgcatcagacagatatatttcatgatgtaatctttccatattcatatcattaacatatccattctgctccaaatacgcatccataagtgcaacagttgccggttcatcatcaaatgctcccaagtgcattatttgaacacataatccctcgtcaatggtcacaaactctgcagatgaacaatctatttttttctttttggttgctgtttcaacagcccattcaaaatccttttgatttacaaaatcaggcaggcgtataactgaaatccaattaaaagaatctttatctgcataatttacaccatgtatattttcctgccaccagaatccttcaagtggtggaactacatattcaaaaaatcctgcaattttatgatctgtcttataactcattctcaaagtatatgcaaccgcatataatacactaattgcctgctgatatgctccaccttcttcgtttggattaccctttcctctgaccgcaatataatttgctttagggacagtcacgatctctggtttatttttaggcatataaaactctttatattctttcttaaaatcaaaagccataactaactccttaaatttataatttatgaactcaaattcgttaccagtgacgaatatctttttgtcttgtttttaatatctttctcagtaacaccataataactgtataaatctctggatattttcttaaattttttcattaccgccttatttcctgaataagacattctaaatatattccaagtataatctatctccatttcaagaaaatcatcatcgattcttattttatacaaatgaaaatccataggaattatactatcgggcatttcagcaatcatttcacttcgagtctttattttacccaaatactctttgacggatgcttcattagaaaaatccggtaccggaatatccttcatttcacccaaaagttctggttcatactgcaaaatcaaactctcttttagacattttatttgttcaatatattctctatcagcgggagcagtttcggtcaattcgtatttatcttttgcatactgcactgtttcagaaagagaatgaggatttgcaactattgtcttctctactttttttctcttatatctatatatgctatttttgattctaatctttaatggttgcttttttgaatgtcctgctataaaaatgcttgtaggaccatctgcaccacctatgattgaaatcgcatttttacttttttgtttcattcgccttttcctcacaaatcccgatttctatttttgtttccatagcatggtgtactctttttcaccagtagcttcatctaaatcttcacattgaataatgaacccttctctttggtaaaaagaaattgctctggcatttttctggtatacatttaatcgtaagctaacttttttatccttaatataatccaataaaagtttacctatgccacatgactgcatttcatcagagacaaaaacaccttcgatatattcatcatttagtcctacaaatccttgtatctttttatccgcttcaaacacatagatttcggattgtaacatcatttcttttactagttcatagttacttttccagtattgattggaaataaaataatgtgctttcagatttgtctttaaccatatgtcagcaactctatcaatatctccgttcagcaactttctaatcataaccaatattctccccaactacatcctttatgtttttctctttttttcattctatcacaagcttaccattaatcattatttttttgatattttttatttcctatcgtaagtacaagatattttcttgtttataactattcttttctaataaaaagtgaaaatgcaaagtaagcgatatctgtaacctattttgtgaaagtgaactataatcaattaacgttagtgagttttttaaatataaaggagtcaaatcagtgtgatttggctccttcccttatctgtatatctatgcctcttgccttcttgtttttcatgatattttcatatacaacgtgtgagacaactcccgatttgattttttatattatatcaattacatttgaacaatcagaagtgctggcaagtgtatatcaaccgtatttatatttaccaagaccggtttccagaagacatccgatggatataggacgcagggcaaaacagtttgcaccttttgcagcacttcggggactggatgaaaccgttcgacaacaagagattctttatgaacctagaaagattctatcggaggaaaagcaaaatgagttggatatgaaattgaatatcttaacttgtgaccggaagatacaagtaacatatttcgtaaggtcacagaagaatccattaatcggtcaataccatacgataatgggaactgtaaaattctttgattcatcgtcatatttacggattgatgatatcactcccttacttcttcgtgatagttcctcgcaataatttctaaaacaaaagccgatcatatattattatacaaccggcccttgtacatcttcaattatttttcaaatggtttgtattcaacatcaaatccaaagtgcttaggtccgaagcattccaaaccttctggagtagtccagatttcaggggatggaagtgcaattactgtcatcttatcaccaacttcaaaattaggtgtagtcattggatttccttctccgttaatcatgcagattaggtctggagcaattacatcaacttcgccattgcggtatgagatgatgttttcgttcttaaaccagatgcgatatgcttcgtccgtataatctctttcgccctttagatgaatttcaccaaagttgaagccatctcttgtttcacaagtgtaatctgaaatgtggcctctgaataatactttaccttctttatcatcacagatagcagaagcaacatctccgccagcttcctttgtttctctaagaactctaccgatttcctgagcgtaagtaattgcaccaggaattagagaattcttgataaccttaccaacgtttgcgtgatcagctacacctacaaggttgtcacttacaacagcaatagctctaacgatatcttcagctcttaggtcatccgctacattctgaattacaattttttcaccaaattttgtagctacgcccatagggaaaataggaacgttctttacatagtatgtagaatgctgcagttcaggaactgaacgtccggctgggtcagcgtcaataagaggtaaatccattaacagtgcaacgtgaagagcctcagctgtattttctccacctaattcagttgagccaattgcatacattttcttacctaaagattcctctagagcctgtacagctaaaactgcgggagctgtttcgctatgcttcagatgagctaatctaggatcaggtttagctgatggagcaccgcaaccataaggagtaacaacatactcgtcatctggaagttcatctaaagtgattaattttagagtttttcccttttcgaaatgttcttctaaaagagccaaaccgtcagcaagtggaccgccaccaccggtaccaagcactgcacatccgtacaatagatcgatcatgtcctgtttgtttaattctctcatttttctgtctcctctttttttgtgataatttatgctatattttcggcattatctcttgatgcagatggaataaagcgctctgcaataagatagataacaaaacctataatgataccaacgaattcaattttaactagtgtataagaaataattgcacctaatgcccaagcaattacaccagcccagtttacaccgtcctgtggtctaaagttcttagctttaccttttcctacaacccagtagtcagcaagaattactccgccaacaggacaaacaacgtatgatagtaagcttaacactccctcaacgtgtcctaagatacccaggtcgcataatacaataccaacaattcctgaaattaaagtagcttctcttcttcggttatctttaagcttaagtgccataacaatgttaagacctgcgctgtaagcatttgttgagttagttgtccatgttgaaataacaagtgcaatgatgcccaggagtggaagtcctacttcaattagaaccatactgatatcatactgtcctgatagctttgtaagaacgattcccataatcagagttattacacccattgggaatacaccgtagaatacagatttaacagtgtcttttctgcttttctggaatctagtatagtcaggaccagtgattgtacctacagcagtgaagttaaatgatagtgctacacctgacataaagctcatagattgtacagttccttcatcgttaaggtttcctgttccgtaaaccttaaatgctaggaatgttccgtagcacataatgatcattagtaatggaatagaaatcttgtctagtttttctagcgcatgcactccatatactgcagtcagaagcattatgattccccaaattgtgtttgaaactacaactggaatatcccatccggtcatagctagcattgcgttactgaaggcttctccacatactccattctggattccaaaccagccaatcatgttaacagcaaagattgtacttacgataaatctagctccgctttttccaaagccggcctgacagcatgtgcaggatgctagtccaaggtcacagcctatcattcccgttgcaaccatacctactactacaattaagtagcctagtgaccctgaaataattgctggccatataggcattgcttccgctaataacgctcccaataggaatgcaggaacgcatacacatatgccggcctgaacgaaggctaacgaaatccagtcttttctgtcttcagcagaaatcgcctgcagagctgtgacttctgctttcttacctttattttcatttgtactcataatgggtacctccttttgaatcttctctatgatagcacacactattataaatgataattatgcagatgacagaattatttatcaatcatattgtgcttttgcacaaaagccttgtttatgactgtgagttttgatatcataaaggaaaaaattatactaggaggagccatgagtgttactgttcaagattgtttaagactaccctcttttcattctgcgagagtgattgcaggcaagaatggactgggtagaatagtatcatcagtatctgtaatagaaatacctgcaaagtctgtagaggcaattagtgtattcaatcccaatgagttgttagtcacgtcattttattcaattaaagatgatcctactagacaatgcgaggaaatgagaaacttatatgatgctggaggcgttgcactagtgctgttttacgtgggtgacgtcatccctcaggtgtctgacgagttgttgcagactgcagacgttatgaacatacctttaattcttattgaagacgaagcagaatatagtgttagttatagtgatgtaattaaagatgtaatgggggctgttttctacgatcaggcatctacggattccttttcagacactgtggagaatagattgaagcagattccttacaataaaagaagcatggaaaccctgctaaatgtaatagctgaaacttataactgtaaccttgtgctttataacaaaaacggtttatatttcacatctatatataagccgtcctttggacaatttggtccagaattcttttttaatgccttcgctgatggctcaacggaccttttctgtaaaagcataatgttgcaggataagtcattttatttgtatagaaaagagttcccccacgcaggaaatacctggcttacattatatgcttcaagcaacgaaaacagcattagtgaacacaagctagatgaaatttgtgcatgcacaaatttcttctcaaccttatggggctacaccctcgatatgcagaattataatactgttattactttgatcttgaaatcatcgcgcgtaataggagaaaaattccttgaagctagtggtgtgcctttttctaagctttcaactattcttgtagtagaatcggaaaaagacaatttaacagacattcttcggcagattgaaggcatattgaaggaaagtgaaagattctacgttaaggatattattgacgacagacttgtaattctaagttctataatggtttcccaaaaggatgatggcattatagctacggaaatagagaaatgcataaacgagtatgagggagccttgtttttcttggagtctagcaaaaatctaacttcaatgaggaaaatatactcagacttttgtgcaaattcagcagcaatgagcaaaattttcatccaccgaaaatttcgcgacatgtatgatgttatattttcgcaggaaatcacaaatctagctataaatagaggcaatcgaaacgatcaaatcaaatccataatagaagccttaaaggacgacagtaacaacctgatggaaacccttgcagtgtacctaatcgactgcgactcccagttgagcaccactgcagccaccttgtttttgcatagaaatactgtgacgtacaggcttaataagataaagcagataacaaacactgatttcacccttatgccggccacctatgatttttatctagcagctgcgctgtggcggttaaacgaaaattcctaatgtgagaatttcaaatcaaagtctatcactcgtgattgacaaaatatgacgagggctttattgcagtggtgcgctcggtgagcacacccttacatacaaaattaggagaatcttccattttgtatgtaggggtgtttcagccctcctttagtactgcgattcgtgttgtgatcagttgtttagtctgttctatatatttctccggtaaataggaatcttcacatgcacataaaagtttgtcttctagagaacacattttaggcacagttttgattccagcaattttggcggctaccatggcgaagttttcgaattctggcaaattatcatattcctcagtctgtggtttctatttcaatttctactatggtttcgcctttccaattacttttttcttttactttctgcatgatttacctccttatcttaggacgacaaaaaacccgtccaaactagaattttttataaatctagtctgaacgggcatgccattcgttcgttagcaggactgtaaatttttcttgttagcaaatgactgctttttattagctgtcagctaatatttttatggatttgttagcagaaacagctgattttcaaagcaattatttttcgaaaaaaagaaaaagcggataacgattttgctaattagctaatcatttccgcctcttatcaagcgttccctgtaggaatcgaacctacaataaagtcttaggagttatacagggagctgtcaatgtttgatagtttctgtatgaaaaagcccgatttttcttatgaaaaacggctttccaatttttatccagtcaattactgtaatcagctataaaccttagataagtacagcttgttagcaactttttagctacagctaatatttggggaagtatgtaatgatactaactacatcaatcctatgactaccattcccttagaggtggaaatgatatctatatttaattgactagatttatatttataatatacaacgtgagcgtgtatttgtctatggaaatttcgactactttttatttttgaaattaggggattttccaataatgcatttccattaaaaccaacgcttccttatagacgctatattatttattctttccaaataggtgcaaaaaaagagcatttacggttttacggtaaatactctttttactgccaatattcaatttatatcattcggttttcataatcttgtaattcatggaaaatatcatccacatatacaacatcattttctattctgtacaacataaagtatctgtgctgttgaaaatttattcgacgatatccaaggctctgtaaacgcggattgtcgcatacattcaaactactcgctacatacttcaactttttaatagtatcctcaaaatcatcaagcacatttttggctgcctgcttatttttcttggcaaaaagcagatactgtataaactggttcaagtcttcttctgcttcagctgttacaactactttataatccatattttcctctcatatctgaaatcacatcatctgcatttcggtaatttcccttttttgaagattctctggattgttccagtctttgaagcatctcttcttctgtcatagatgtataaggattatgcacagttcgttttatttcaaatggaaatccattatatgcaaccgcctgcgttaaaaacatccttattgctgatgtcgtatcagttccaagatctttaaaaagctgatctgatttattttttaagtcatcgtctaccctgatctgaattgtacttgccattttagaaacctccttttttcttcattataatgccatttcattgctgattcaatacaattgtattgatgttttgctcgcttttattgaataatttctataggcatgatggagatagactcactacttttcattacttcattgtcttagccagcgaattaagcaacgcccgcatttccggattcgccagagctttcatcaataattccatatcgacttcttcagaaaccatatttggctcaagattatttttcttgtaaaatgcatcttcaaataattcagcgttcttttttctgtcttcatcaataatatgggaatacacatctgtaaccatatctgtctgggaatggccagaatcgccctgcacagcttttatatcacctttattgagctttaatttataggtgacactgctatgacgcaaactgtgaaatacaactttggggagatgatgttcttcaattagtttattgaaggatactcgaattgttccggattctaatggagagccaaattcacttgtcatcactaagttgtaatcattatattcctctccaaggattgcttttgtattaagttgtttcagtttccatttttgcagcatttcggcaacacttcttggtagaaaaactttacgtacactactttctgttttcggtattttcagaacaagaagagtagtattctttgtatgacttcttctatctaaaaaataagtgtatgttacaatacatttataaaatatgtagggggattcagaaactatgaaggaagcatttaaaaagcataaaaaagttgtcgtatttgttgcagctattataattattatcatatgttgcattgctggttatatggcaaaaatcaaatatgagcagaaacaaagaaattaatcaagaaatatggaacccgagatccatttgagatcatggatcagatgaacattgttgtcggggaaacttccagatataagacactgaaaggatactgttttatgagctgtaagacaatctatgtcatgatcagcagtttcctttcagaagaagaaaagatgatcgttgccgcccatgaattagggcatatcatcctgcatcgttcccagctgaaaatggctccaatgcaagatgatacactctacaatatgacagataatacagaatatcaggccaatctgtttgctgccgatctactgattgaagatgaagacattgaagagatggttcagaacgaagatctggattatttcggcctctgcagttcattgaatgcgactccggaactcatgagctttaaactatacagcctggcaaaacgaggccaggcttatcatatgccgatggagattcagagcaatttcctggcgaaataaagtaaataaagatcctgttctatatatcatagtatgaacaggatctttttataatgatttattttctatttaaaattttattaaaccgactaaagactccatagtttgtgtgtttgacttactgtttatatctatcttctcctaaatatttttctagtcattgcaatataaaattgcttatacagtctctcccttaagagtcctggtattttggataatatacagagcgaccgatatgaccatcattatagcgcacaaaccaatcaacagatctgataccatcggtgtaatgtggaaccatataatatgtacagccacagttccatataataaaaaggttactatctttccatgccagtctgcaccatgtacttttcctgtcttttgtatcacaagacatccactaaccgccatataaagttccttaactgccattataacgatcaacgggagcatatgtggaaagcgagtaaacaagcaaatcaacattgctgcctgtgtcagcttatcagccaccggatcaagtatttttcctaaattactaatcctatggaatcttcttgcgatatatccatcagcaagatccgtaagaccagacagcaataagatttcaccaactaacagaggatttttctttacacaataactccatataattaccggaatcaaacaaagccgaaaaaaagaaagaagattaggaaccgtaataattctattcaaattttcttcctgattcacttcactctgcatgtacggtcacctcacttaccttttttttagacataaaccaataaaatataacacaaaatgctaaagcaaacacaacaccaaaaacattttgaatcactctaagactaaccgctccttgtagaccataagtctctgcagcaatggctaaagcaccaaatgtgttaaatactgcctgccagccatattgtgctgaaagtcctacaccgattccaccaagaattcctatatatgcatagattgacgaaggaagcagaaaatataatactgtaaaacatataacacctgcaatatttccgacaatccttttacggactctgtagtgcatatcttccataaacggcaaaatcgcggacatggccgcaataccagcccacattgcacgtggcatattacaaagttctgcaatgcaaaggacaatcggtacgcataaaatctgacatatctgccattttgttctggaagaagtgatatcaaattcttgtatcagatctttcagatttcttttataagttctgtttttatgatttcgataaaatacgaagcaggtaagtgctgcacctaaagccattccgactaatcgcatctgatagctttttcccgtaacatcataaccatatagcagcagatacccaagaaccaatgtagattgattaaacatgaatggattatggcatccgaacagaatcaacacagccagtgccgcaatatttaacagcattcccaataccggtgaaaactgatttgctaaatgcggacatacagtcataattacaaagaacaaagccaaaagcatcgtagattgtccggtgtggatccccagatccgcattccgaaataccataaggcataataaaactactacacccacaatactattctcatttccaaataagatactgaaaatagtaacaaatgaaaaacaaaatgccattgtaacagctatctttaccaaatatagcagtatatgatatgatttttctttcactgtttcactctttttcaacagatttttagaacctgcctgatttaactgcaattcctgataaaatgtcatgtaattcctcctctatctgtttttcttaaacttatatggcctcatctttctgtattggaagctctacaacaaatctgcatccaccatattcacggttttctgctttgattgttcctccggcactatctacaatccgttttacaagtgcaagacctaggccatttccttctgctttatgagatccatctacctgatagaacttgtcaaatattctggattttacatcatcctctattcctggtccttcatcttccagaatgaacttaacagaatcctgttcttgtttcagaaacatcgtaattgtcccctttgaagggctgaacttaatcgcattatccaaaagatttatccagatatgcataaaaagtccttcattcccagtatatttaacttcctccaattctacctgaaaaccaatttctttttctgtccattttgtttccaatgaaagaaatgcctggcggatctgttcatccagacgatattctgtttttttcattggtatattctgattctctaacttggataacagcaaaatattaccaaccaatccggaaagtctttgggtgttaaataagattttttctacatattcctcttgatccggagacagttcttctccctgaagcagcattgtatatccttcaatggcattaatcggggtcttgaactcatgagaaacattagatacaaaatccatctgcagcacctctgttgcacgaagttcttttgtcataacgttaaaactttgataagattctccaacttctgctatacggctgttcgtttccaaatgctgttcaaaatctccctgagaaacttccttcattgctttaccaagtctggtaattggttccagtaactttgcattgataaaggaagtgatcagccctgcaatcaatgtattgaaaatcaaaagccagccaagcacaggtatgctgcccggcagattaaaaaaatgattcaaaaaagcaaataataaagcagatatgactgttgaaaatacaagtgccagccagattgcaccagtcagacaggatcggatccgcaatcttttttctttcttttgttccattattttttcaccaccttgtatccaattccacgcattgttacgatttcaaaatcagggttatctttaaaacgctctctgattcttcctatatgtacctctatcgtatgtgggtctgcctccgtctcgtatccccatacttcatccatcaactgttgttttgtaaatgttctgcctggcgaagctgcaagcttatataaaagcaggaattcttttttaggcaaaacaagactttccttatcagttgtaaccgtcattgcatcataatcaaactctgttgaaccgatcacaattttgtgttcattcagtatctgtgcacggcgaagcagtgctccgactcttaaaaccatttcattcacatttaccggttttaccatataatcgtcacttcccgaaagaaatccctggcgcatatcatcaaaggaacctttcgcagtgatcataagcactggtatctgatatcctgctgagcgaagttctgacaccagttcatagccatccataaccggcatcataatatcagaaatgatcagatcaatatattccttatccaatacttctaatgcctgtgctccatccgatgcacttttgacttgatatccattcttctcaagcactttttggaatagctggcttaattctttatcatcttctacaattaatatttgaaacacgttttccttcctccttattaaaacagataccttgcccatccaagcagatgctgtaccaaaaatatttttctctgacgtttctttgttaattcgatcggctttacatgatatggatcacgataggttccattttccaatacctggcgggacactctttcatattccatcatgccctcttccaactgtttattaatatctttactgcgaattacaagcatcagttccgtatccagatatgcacttctcatgtccatattaaaggaaccgattacagacagatcatcgtcaatcagaatactttttccgtggtatgaataaccgccttcatattcccagatattaattcctgtacttaagattctatttctgtttttcgcataatcggcagccccaaatggattcccattattcgcaactgaatttgtcatgatagaaaaatctgaaacgttctctgcaatctcctcccatgtattatacatcatatcattacagataatatatggcgtgtggatcttcacacgattttttgcatttttcatcaattctcccaactgataccacactactggttctttggaacctgtgtgaataggatttgacactaatgcaatcttttctgtctcaaaagtttcgtccgtgtaatcggtatcgcagattctttccttattctcttcaaaatatttctgatagccgttctgcagctctaaaactgcgttctttacagattttctatttgccagttttttattgtcatgaaaataaccactgtcttcttgttcccatatcgtttcaaaatactctaacaactggttaactgaattttctttctcaggttcatcgcaaaccactaacacgtctctgtcatagttcttatgtcccggaaaatcccccaggaaataattgtatgtatttcttcccccaagaatatatctctttccatctgcaatcaaatatttatcatgcattctacccatcattttccacggtttcaacggattggccttattatatagtttaatttcaacattctcatgggaagataatccatagaaatacggatttccttccatatcaatccagctctccattccatctactaacagacgaatatgtacacctctgtctgccgcatcatgcagtgctcctaagatcaattttccactttcatcggattgaaatgcaaaagtagaaagaataatttccttttttgcattcttaatcaaacgcactctttgtaaaagcgcttctggattcttttctatgattactgcccgttctgtattttcactgcattcgttccatgacccattttttgtttcttttttggttgtattggacacttccggctgctttttatatgcaacgcagattccgagcaattcataaaaagccacacataaaaaaattgccagtataacaagaaggattttacatattttatgctttttcattgtacatcacctgattcctttttatttcatacttatacaatacaaagtcaatctcaatttaacctcaacaaaatttatttttcataaaaaatatgaccggcttctttttaatgaaacagtcatatttttattctaatatatgaaggagcttttcttactccgttgtattaatcactattttatttcttccataagctgtcggatttttctcaatgtacaccgtgtaactgccaggtcatcttcttgtatattcgatatgattttttcataagcttctatcattttttctttctgacaattacttaattcaattgccttgttcgtcaaaacaaggtatgttctttcttttttttcatctaatttccagataatatatcctttattttcaagactttttaccatcttagatgtttctggaatcgataatttcatgtattctgccacttctgaaagatatactccttcatgacagtctgatttttcaacacattcctttatactataaagaaacaaataatctgttctttcaacaaattcaaatatactttcaacattgatgctctttaaaaaaaactcctctgcactggttcctgctcccatattatcgttcctctctttctatatattcttttttgctgactagactcttatatgccgggcgaatgatcttatctgtagttatcaattcttccaggcgatgtgcactccaaccagcaattcttgctatcgcaaataatggcgtatacaattctcttggaatattcaacatgtcatacacaaaaccactatagaaatctatattaggacttactcctttgaatatctgacgctgctttgcaatcaacttaggtgcaatcttctcaatattgttataaagggtcatatctttctcacgtcctttatcccttgcgagttgttctacaaagcctttgaacaccctttctctcggatctgaaatagaatatacagcatgtcccattccataaataagtcctttctgatcaaacgcctctttcttcaaaatcttactcagatatgatgcaatttcctcttcgtcttcataatctttcacatgacttttaatatcatccatcatattcattaccatcagatttgcaccgccatgtttttttccttttaaggatgacattgctgctgaaataacagaataagtatctgaacctgaagatgttactacccgtgtagtgaatgtagaattgttaccaccaccatgttccatatgtaacaataatgctatatccagtactcttgcttccagttctgtgaattttgtatctggtcttaataggcgcaggaaattttcagcaatagataaatctttttcaggtctatgaatatacatactttcgtttttttcataatgacaataagcatggtatgcatatactgctaacataggaaatgctgcgatcaactgcatactctgccttagcacattcggaatttcaagactttctttctccttatcgtaagagcccaatgtaagaatacttcgagtcatagaacccataatatctgatgtaggtgctttcataatgacatctctggtaaagttagtcggtagttccatacaatcagatagtcttccctgaaattccattaactgtgtatcagttggcaattctccgaataaaagaagatatgctccttcttcaaagacaaacctttttcctttacttcctgttactaaatcttttatattataaccacgataagataactcgccatcacatggactctttactccatcacgatattcaaaagcttttatatcagaaatatttgtaagccccgtcaacacaccttggcctttttcatctcgtaagcctctttttacaccatactctgaatacagattcttactaatgctattattttgttcacaaaaaattgcttgctgtttcatataattttccaaattgctcatttgaatcgctcctttcattctgttacgaacttacatactatactcagatattcttgtttccagagcattcagcattgtctgttctttttcttattcttattcattagcaatacaatacaatggaaaactcaatttaacctcaacaaggtttgttttttcatccatgcaaaatcttctttgtacaacagactgttagatatagcaaaaacggcctttcaaaaacagttaacttctaaatcaactgttttttgaaaggtcgtttcatcagattcttatagcaatccagcaaataatctcataaataattgtcccagtcgcaaatatgcacttcgtccggtttgatattggtctgtcacatcacgacattctcccatcgttcttatcagatcattttttatttccacaactgcctgacaatctgccataaaacagccgttttcaaaatggtgatataaacttcgataatccagattaattgttccacaagttgccatacagtcatctgccacactcatttttgcatggcagaaaccaggagtccactcataaacacgaacaccatgtttaactaatccatgataaaaagaacgagttatattataaatgaattttttatcagggataccaggtgtgataattcttacgtctacccctcgcttagcagccagacataacgcatgcgtcatttcatctgttatgattagatatggagtcataaaccaacaatatttttcagctttatttatcatactgatataaacttcttctcctacttgctcattatccatagggctgtctgcataaggttgaacaaacccagtttgctgtgccgcataatcatagtggaaaagatatttactaaaatcagaatcattagcatccttatcacttcttcttttgttaatgcagagatttctacagcaggattgaatgagatttctccctgatcgagcttttgaagcaattcaggaatcagccttgttactgcgatatatctctgaacttgctttgggctgtcaccaaattcttctccaattaattcaattgtcttcttgcctttcttttgttggccactttgtccctttttccggcctactttttgtttcagtacttcatttttcattctgtaagcaaaagctttctcgctgaaagagatatgttcccggtgcaaatttgtatcaaccatttttacaaccgcatcttcatagctcataggctggatcagtaccggtatttttctatatcccaaaagcgcagcagctctttttcttcgatgcccggaaatgatttcataagtaccatctttgattggtctgacaagtagtggtgttaaaattccgtacattttgatactttctttcagcttttccagatcgtcatcatcccttacctggaatgggtgattacgaaatgctttgagtcgttctatttcaatttctactatggtttcgcctttccaattacttttttcttttactttctgcatgatttacctccttatcttaggacgataaaaaacccgtccaaactagaattttttataaatctagtctgaacgggcatgccattcgttcgttagcagggctaactcttaaatatagatttcagctaatcgatgtttgcaagattcaaatcggatgagtgaatttactttacttttctctattttacatcccttttctttggttaataagaccactttcccaaatgttagcaggactataaatttttcttgttagcaaaagactgctttttattagctgtcagctaacatttttatggatttgttagcagaaacagctgattttcaaagcaattatttttcgaaaaaaagaaaaaagcggataacgattttgctaatcagctaatcatttccgcctcttatcaagcgttccctgtaggaatcgaacctacaataaagtcttaggagagctccaacctattgtcactctctgtcaatctgaggtaaggtaaacccaagtgggatactatataaaactgtttccgattcaattcgagttattctgaataccccctctgtcaagctctgtaaagctctgaaagttagctgattgtttgctccagctaataattggggaatgccttgatattaccatcgacatctgttatatgaccaccatgcttcgtacgttcgatcatggtaaacagtattcaattaaacttcctatcgaaagcacaagatattttcttgtctataaataatataacgcatacgagacggtttgtccatgcgtttttgactggcaaattttattcagtaaaaatatctgtaaccttttttgtaactgaatctccatcattccatcatcaaatgatggagattccaatagatatgatggagatagactaattacttcatcgtcttcgccagtgaattgagcaatgcccgcatctctggatttgccaacacttttgccagaagttccggatcgacttcatcagcaacagttgcattattattttcctgctgtacatgcatctgtggatccagattctttttctcataaaacgcttcttcaaaaagctctgcatttttccttcggtcatcatccagaatatgagagtacacatccgtaaccatattgacctgagcatggccggaatcaccctgtaccgccttgatgtctccaccattcaatttcagcttataagtaacgctgctatgacgaaaactgtgaaatacaaccggtgggagattatagtcctcgatcagtttttttaaaggaccacgtattgctccatctcctagaggaagcccaaaggtacttgccataaccaggttatagtccatatattcatcaccaaggatttctttcatttcatcctgttccgctttccagtctaccaacatattagcgacactctttggtaagaatatcttacgcacactgctttctgtctttggtgttttcagaatacggaccgtagaattcttcttatgatttgtcgggaataccaacaacacatcttttccatccaatgcattcaacgattcttttcttatacgctgtgattctttgttgatgaagacatatgcacggttttcttcaattgcctcaggagaaatatctacacaatcccaggtaagaccaagcagctcaccaagtcgtaaggaacatgaaaaggatagatttattgcaagctttaatcgctcatcttcacagacactgagcgcatacattaatgtatccgctgtccagatgtctcttttttgtgatttatgttttggtacagtcgcatgggtgcaaggattcttctccatcaactcccatttcactgcctgttcaaaacagtttctaagcagcttattaatatccctgaccgtactggaagatacaaattcatttcgactggttttattcaatggattgataactgcacgtctcttcaaaagactctgataatatctttcgatgaatctggtattgatctctgagagtttcgtatcaccaatgatcggaagaatatagttattgataagagagacatttccttcatatgtagaaagcgcccagttttctttgccataaagtgcaacatattctgtaataagctcgtccagtgttttgcatttacggacgacaaatgatcccatctcttttttatattcaatttctttttttcttctctttgcttcggctttcgtttcataggtttcccacttctgtttcctctcacctttttcattcgtataagaatagattacattaaattttccatttcgttctcttatagatgccatattattgcatgctcctttccaaatctctttgttccatccagtcctcaaattcatcccgacagatccttactcgactgccaacttttattactgtgaacttccctttatccgcccacttgttgatcatgcttctgctgacctttgccagataggaagcttcatcaaaagtaagatattttatatttccattgcttcctcgtattccggtttgtgataatttcttccgccggaaattagccagggcaatattctgttcctgtgcaagttcttcataatcattcgatggatccagcttataacggtcctgaccttccaggaatttttgaaaactctcttttgtgatccttttcttttctgcaatcacaatgaattcaaaaaaatgactatacttcggattatcaagaattgtatatactgaacttctggttgttccaagcagctgtgccatctcaggcatcgtaatagttgcattttccaaaagagcgtctttttctctgtcttcctttgttcgataccgggactggcttttataccaattccgaaaagattcttttggtattcgtttccagtaatcgacaataacagcttccatttgatttttcttgagtaaatcataaacaagatattcatcaacacccaacagatccgcgacttccttaacagaataggaccaggatttcaattctttccccggttcttctccggtaactttatggtatttaatctgattggcataccatttttcaaagctggcaatattgattcgtatctttccggcaatctcttttgattcaaaaacgtttttatgcaccagccaatatcgatctgtcttttttaatcccagtagctttcccatttccggcacggtcatccaggtcctcttttgtgttggacgccgtttgtaaggactttcttctgatattttcgaaatgatttcttcaacatcgtccatttccggaacttctttttgtttcataattgctgttgccatttattcttcacttcctgtcttttttagtgttagtgttttttcttatatcatatctcaaatccagataaaaatttaggatgtcgattgcagataaaatctgcctgatcaacaccctgttttttactgttccaagttatcgagccagtcatcgaaactcttcttagagatgcgatactttccgccatccaactggatccaccggaattcctttttcttcaaaaggttataaatagtaggtctgctgactcctaagatttcctgtaactcttgaactgtataacatcttttctctgacatttctttatcctcttttctttgaaatatgaaagaaaaattatcccttcatataacgaaacgctcagagcatgttttacagtggtcaaaagcaaatttttttactttttttcttacgagttttcttgcgagtttttttaatgcaattcgtaagaaactcgtaacattagatttttatatttttcatgaaattaagtaaagaaaaagagcatatggaattgaatccatacactctatgattactggaactttatttcatttttaattcaacaaactggaatttacattctgctcatataaaatatatcaatagctttacttgcaaactctgctgtgccaactcctccaacatcatcaatattttccgtaagttctcctccaccggcatacattcttccaagaccgcataaaatcttatcagaacatgtataaaaatgatctgtaatgtaatcctgaagtttccttacctgcaactgcacctgttcatcttctgggtccatttctttcatttgtccgaattcaacaaataattgcataaactcatttgcaacagtagcttcatcgtctttcgtccagttctttgttttctcttcaaactccttatactcagaggtttgtccccattgttcttttgctcgtttagaatactcatcaatctttgttgtatcaaatactttaaaatccatatatttcactcctattccttttattcctcgagcgaaactaataagattttcaagatgctcttttttcatagttagcaattcaatctgctgctctaatgctttgttcctgtcaaagttaggggcatcaattatctttttaatctccttaagcggaaattccaattctttaaacagtaaaatttgttgcagcctttccaaggatgtatcgtcatacaacctataacctgactctgtatattcaataggttttaagagaccaatggtatcataatactgcagagtgcgtatactcactcctgttaatttacttacctcattcactgtcatcattgtcatttcctcctctcgataaacatatcgtaaactattacgttgcgtaggagtcaatagtttttcaaagaaattttcaaaattaacagcttgataaattctaattttccaatttaacaaacttgaatttctggatgagtataatatgcggaaaataaacttaactccatcttaaatatagtgctgagtttcactgccattctttaacaccattttcaccacaccgagcaatgctgcaaacaaaacaccagcaaccggccatacaatccatgtaatatcccagctcatcgtccagaagctccatgcaaggtaaatcgctgtagtcaagcaccaatatacaccagaaaacgtgtcagtctttttcttaaacagtttttcttcttttgtatattcgccttcctgaagaagggtatcgtaactgctttttaccatcccaacacgaaccaacagattcactcctattgcaagtatgaatagcagcaatccaacggaaaggccgcaactagttaaagataccacaccaaatatgatgaacccacgcttatacactaccagctataataagccgtaaggacagcaatttgacactgctgtcctttcttttataaaattgcagtacacagaaaaaagctgtaaaatgaaaaatatatttgtccttgtaacaattctcggacatttgcctgttatattatctgcaaaaagaaaaggaagtgacaatatgaagcagattttaattgtcgaagacgataatcttttgaataaaacgcttacttataatttggaattggacggttacacaataacttctgttctgaatgcaaggacagccgctgaatcattaaaaacaaacatttttgatttggtattgctggatataaatttaccagacggaaatggttatgacctatgccgtcttatcaagccagagcatcctgatacagtagttatatttctaactgccaacgatcaggaaagcgatcagatacaaggatatgaagctggtgcagtggattatatcacgaaacctttttcgattagtgctttgcagcgaaagatcaaagccatgttcgctatgttggaacatcacaaaccagctaaggatatttacgaggatggtagcctgtttctggatttttcggaacaatttgcaagtttgaacgggaaaccattagcgctttctgcgatggaatataaaatgctgaacctatttcttaaaaatccgaagcaggtacttacccgccaacaacttttggaaaggctgtgggacattgatgaaaaatatgtagatgaacatacccttactacttctatcagccgcgttcgcagtaagattgaagcggatggcgacacatatatcaaaacggtttacggtatgggttatcaatggacaggaggcgaaaagaaatgaaactgaataacctttctgctaagaaaatttgtagactgattagtgctggcatggttttctctatgctggtaattactggtattttcggcggtataatgcaggatacacgaattttcatagcgggtggaacattgacactctgtgcatttttctggatttggctattggtgctgttttttggaaaacgcctttctcatcttacttctaatttgtgccggacgctggacaacatgattgatggaagcgaggaattacaaaagtcaaatgatagtgaaactctttttgcccgtatcaaccaccgcttaatccggttgtatgagattatgcagaaaaaccgacacaaggtagacatggaacgacaggagcttcaaatgctgatttctgatatttcgcatcaagtaaaaacgcctgtcagcaatttgcaaatggtaacggacacacttttaacaaagcctgtttcagaagaagaacggatggactttttacaaggcatacgcagtcagactgataaactggattttctgttccaagcactggttaaaacatcccggttggaaaccggagcgatacgattagaaaagaaagacagcagcttattccatacgcttgcacaagccatgagcagtattgtatatgccgcagagaaaaaagaaattgctgtatccgtggattgcccggaaaatttgataatctcccatgatagcaagtggacaagcgaagcccttttcaatctgctggacaatgcagtaaaatacactccgtcaggtggaaagatttctgtatcagtggttcagtgggaaatgtacgtagaggtcaaagtgaccgacaccggcaagggcatttcagaaaggaatcaggctgccatcttccggcgcttctatcgtgaggaagaagtacacgatcaacagggtgtaggaataggtttgtatttggctcgtgagattgtaacaaggcaagagggctatatcaaggtcgtttcagagctggggcaaggctcagaattttctattatgcttcctgtaaggtaagatataaccactttttttgaaatgtccgagcgttgtaacatttcaccctgattttcgataaaaattttttctatctcggacatttgtgtaacatttgtggtttacaatggctttatcaacagatagaaagccttgaaaggagcatttgaatatgagcattttacaaacaatcgacttaaagaagtattacggcacagaaccaaatattactcgtgcccttaatggtgtaaattttactgtggaacagggagaatttgttgccgtagttggaacttccggcagcggtaagtctacattgcttcacatgatgggaggacttgatacccccacttccggcagcgtgattgtacggggagaagaactcgcaaaaaagaatgatgatgaattgacaattttccgccgtcgtaacatcggatttatcttccaaaattataatctggttccgattttgaatgtatatgaaaatatcgtcctgcctgtggaactggatggcgatacagtagaccagaaatttatggacgaagttgtgtatatgttggctttagaaaataaactggaaaatatgccgaacaatctttcaggcggtcaacagcaacgtgtagcgattgcacgagctttaattacgaagcctgcgattatccttgctgatgaaccgaccggaaatcttgatagcaagaccagtgcagatgtgttagggcttttgaagcgtaccagcggagaatttaatcagaccattgtaatgattactcacaacaacgagatcgctcaactcgcagaccgcattgtacggattgaagatggtaaaattgttggctaaaggaggtgggaattatgaattatccttttgaaaatgataccagtgcagtaattaaaaaattagcacgaaaaagtgtgcgttttgataagaagaaaaacttattttgcctttcggcaattattgtagccgttgctatgataatgatgtcgttgctcacagtgcaaaatatcatttatcaaaatcagaaagaaatcgaaggattacatcaagggattttctttgacattacgcaggacagtaaagaaaagttgttagcaaacgaagaagtaaaaagtgtaggactttcctgtaatatcaaaacagtgaaagaaaattctaaagaactgtctctgatttattatgatgatgacatgcttagtttgattcctgcctttgacggaaaatatccagagaaagcaagtgaaattgctgttacagatgccttttttgccagtgaaaataagtctccggaaatcaacgccatagttcagttgaatctggatggtactttgaagaattatactattgttggtatttaccatgataaaacttctaccgcttatcctgtttttgtttcacttgaaaaatgccgggaattacgtggaaatgacctgcttaatggatatgtttggcttgaaaatgcagatacccttacaaaagacgaagcaacagaaatattatctcaaatttcagaggagactggactgaataattggacagtcagcagttactatgattatgtaaatacaactttgtccttcagtaattatgcggtatatggtgtagttgctgccattttgtttttagctgccgcacttgtaatttacagcattttctatatttcggttggacaaaaagttgctgagttcggacagcttcggacaataggggcaagtaaaaagcaaatttataaaatagttcttaaacagggttatatgcttgcagttccggggattttaattggtagtatcatgggaacaatcatcagctattgtctgcaatcaaaaggctggtcagtatttgcatttattgtttctctatgtggcgcatgcctttttggaatactgcttgtttatattagtgttcgtaaaccagcaaaaattgcagcgaatacttctccaatttccgccctgaaaaatccagtgggaattgtaaattaccgcactcacaaaagacatcgtattacgcctgtatatttagcgaaaatcagcttttccagaaacagaaaaaaatctctattgaccattttatcattgggactgtgcggagttatatttttccttgcagcaagttatcagagttcttttaatgccgagagtatggctcgttattgggatatgaagtacggagatttcaaaatcagcattgatttagaaaacgaaagtgaaaatttggatgctctcttgcagaaagaatatttttctgattatgtaaagcgtgttggagatatagagggagttagcaatatatttacttatgctaccgtaccagttgatttctcaacagacaatgatatttcagatagcaccttgatgctcggctataatgaaaaggatttggcgtcgctaaatgcagcggttttgtctggaaatattactgatgatacagaattagttgtaagtgatcccgaacgtatttatgatgtttaccattggaaacctcaaattggggatactgtgacctttaatttcaaaaatcatagtggtaaaacaataacaaaagcattcaaaattggtgcaatcacttccagcaatgatggaatgggtggctatattttcagaatgccggaaaatatgctcaaagaacttgcaggttatgactgtacatacgcaatcgaaatacaagcagaagctgaatatcaggagataatcgagcaagaactcaaattactcgtttctgacaatagggatgttcgcttacaaacccttcaagattttattgtagaacaccaatcagacaatcgtgcaggttttacattagcttatgcgattgcagccatcttgtggatatttgcggtcatcaatcaaatcaatcttactgtgacaaatcttttatcacagaaacaggaaatgggcacactaaaatctattggtatgacaaataagcagttggagcaagaatttatgatggaaggtctttttactactttgattgcattgcttataactgctgttgttggaatccccggcggatatgcaatcggtatatttttgaaaaatgcaggcatgtctacgggatttgtatttccggttgttgcttttactctttttgctgttgctatgtttatgcttgaaagtttgatgacaatattgcttattcattcatggaagaagcaatctgttattgcaataatgcgaaattgacgatagaaagtttttcatatctcggtcagctcaacaattacattactctgctgatacagccagtccgtaaattctttcgggctggctgttcctgtttttacagccttttttctctgcaatgaacccttctctttggtaaaaagaaattgctctggcattcttctggtatacatttaatcgtaagctaacttttttatccttaacataatctaataaaagcttacctatgccacatgactgcatttcatcggagacaaaaataccttctatatatttatcatttagtcctacaaatccttgtatcattttatctgcttcaaacacataaacttcgtattgtgacatcatttcttttactaattcataattacttttccagtattgattggaaataaaataatgtgctttcagatttgtctttaaccatatgtcagcaactctattgatatctccgttcagcaactttctaatcataacaaatattctccacaactacatcctttatgcattttctcttttttccattctatcacaagctcaccattaatcatcaattttttgatattttttcttttcccccactgtaaaacagcctctgagcgtttcgttatatagagggatacaaataagagcaagatccacccatgtttaacagtattgccatttggcatcctgttctcctatgggatttatcttgatggggatctccccataccctctcaataacagacgtttcacttgtctgttggttccacctaaaggtgttcacagcactatttctaatatcggaagggacagccgatattgaaatacgtggattcccggcgggaggaatagtctcagcgaaaggaggagtatgagaacaaaaaacaaagataaagaactgaatcacagacattttataggattacgtcttacagatgtcgaactggatttattagaccaaggcgctgcttgtttatctgttagccgatcagaatatctgaggaaacttctattggaaaagcaaatccatcatcagattgaagttgttgcagacatgaatgatctcagaaaactggtcagtgaatatggaaaaatcggatcgaatctcaatcagatcgccaagcattttaacagtggtggcagtcagtctcgtgctatagaaaatgaaatccatcagtgcatcacggacttattcctattgagaaaagaggtactgaaactggcaggtggtatgaatggcaatcgtaaaacacattaaaagcagaaatgcaaattactcggctgctatcaattaccttctgtttgaacatgatgaaaaaaccgggaaaaagattgtagatgaatccggacgaagcatcctacgaaaagagttttatatggatggactgaactgtgatccgatgtcttttgacaaggaatgtgaactgacaaatgctcattttcacaaaaataagaaacgtgaagatatcaaaagtcaccactacattatcagctacgatccagccgatgttacagaaaacggtcttaccggagagagagcacaggcaatcagtttggaccttgcaaagcagatgtttcccggatatcaggcactggtggttacgcatactgatggtcacaatgaatccggaaatatccatactcatatcgtcatcaacagtgtgcgaaagactgcagtggaaaggcggccttatatggataaaccacatgaggaagccgccggttacaagcatcgatccactgataaattcatgaacacttttaagaaaaccgtcatggatcggtgccaacaggaaggacttcaccaaatagatcttcttgcaccggctgagaaaaaaatcactcagaaagagtatatggcacagaaacatggccaacaaaaactggatgagatcaatcagaaaatcatcgaagatggtctcaagccaacatccaccgtgttccttacacagaaagaatatttgcgaaatgcaattgatgaatgtgctgccacatccaatagttttgatgaattccaatccaaacttctggaacaatttcaaatctctgtgattgagcatcgtagcagatacagctatcttcatcctgatcgacagaagcggattactgaacgtgcactgggaacacgatatggaaaagaatacctggaacagaccttcttacgcaaggatccattggccatcctctacatcagatctcacctgcgcctggttgtaaatctccagacaaatgtgaaagcaatgcagagcccggcttatgctcatcgggtaaaactttctaacctgcagcaaatggcaaataccattatctatgtgcaggaacatggatttgatacgcagtcagatctgaaaaacacactgcttgcctcaaagcaggaactaaaagaaatgcagacacaggttgctcagcatcgttccgatctaaggatcctcaacaatcagatccgttataccggacagtactatgcaaataaggaagtttattcccagttttcaaaagcaaagtacaaaggaaagtaccggaaagaacatgcgaaggaaattcagaaatatgaagaagccagaaattggctgagatccttttatcaggatggaaagatgacaagcctaaaaaccttgactttgcaaaaagaaaaactgcaacagcagatagcttccgaagaagaagcaataagtagcttaaaagaaaaattaaaagatctggatactgccgatcagaatgttgatgccattcttcagatgcagattccggaaccagtgagattaaaaaccaaagatctcgaacgataattatcacaaaacaaaggaggaactatcacatgacacaagaagaatttaatgttgtatttgaacttcagatgagaaagtgtgccgatattctggcacataaaaagaaagaatataccggtgacaatattgaccgcctcagcgcattcaagattgctgccgcattacagaactgcgatccaaaagcagcactggccggtatgatgtcgaaacatgtcgtatccctttacgatatgtgttattccactctgttacattttgacatggaacagtgggatgaaaaaatcacagactgcatcaattatctgatccttttaaaagctctggtaaaggaggaacaggcctatggatcacattgaaacagctatcttaaactgctatggaatccgggaagcagaacagaatatggtctttgctgccaggctcacacaacacggtcatacgatccagaacatggcagatctgatggatctttaccgtcaatcctacagtcagaagactgtagaaaacattgcagggcttccgcatccaaccgtgcagaaattcatggtcattaccgtagctgttgttggtgcaagcagacgcttcctggcacagatcacaagacatcagaacgaagtaaagtacatgagtgcatctctgcagtacagcaattattccggtcatgctgcatttgctattccatatggaatcatgaaagcagataaagaaatccaagatatttacaagaaaagctgtcagtcagatctggatcattatgcagagctttgtgccttaggcattgatcatgattcagccggatatgccacacctcagggacttcgaaacgtactgatcatcagcgcgacaccttaccagtggaagcatatgattggccaaagaacctgccgaagaaatacggatgaaacaaggattgtgatgctacagatctggcaaagattgtacaaattgagcccaatcctttttgcaccggatcttaccggtccattctgtcagagaagaagctgcatggaaaaacagatgtcctgccagaatcctatttcaaagttttggataccgtcagatatcttaaaagcagattatccattgctcatcaggaaggaggtgagcagccataaagattaaactgattgactttggtctgaaagcagatcatcatcccttccggccacatgaaaatgatgccggtgcggatgtattcatgccttatgattgcgtattaaagccaggcgaagttgcgagaattccgcttggatttggtctcatcatcccggatggatttgccggatatgtctttccacgaagcagcatggctgcaaaaggactggtatgcgaacttccaccgattgactccggttaccgtggtgagatccatgccattatcagcaacgtgagcacatcttctcagatcattcataaagactcacgcgtcggtcagctggtgatcacaccggttgtgatcgcagactttgtcctggatctcggtgaagaacgaggaactggggcttttggaagcacaggagaataatactatgattacatttggaagaaaattaaaacacttaagacagaaaaatcatctcacccagaaagaacttggcatggctgttggatttcccgacagctgtgctgatgtccggattgctcagtatgaaagcgatgtccgaacaccaaaagaggatcttatgaaaatctttgcatcaacactcggtgttccggttgaactctttactgtaccggtactctcagaacctagggaatatgaggcggcggagtattggaggtatgagttaggggcggaactagattaattgtcataatactgaaatgaggcaacggattttccgctgcctcgcttttatcattttgagggtaattgaaaatatcctcctgtgttgagcaatcctctttttctgcgctttatctgcatatctatatatttcattttatttctgttccatcgataaaaagcacatatttatccggattatgaacaatatcataatcttttccatattcaatcggtctaaattctatctgcataatggattttccattttcgatatcttctttccaagaatatacggtcatatcaaggctggttgcatatccatgatctgtagaaaattttattgaatgaaatgaattctctttgtacatttttaaaagcagtcttgtaaatgcttctttatcagaaatattttttctgttagcaactactgtaagattctcatctctattcatagaaaaactgccaactacatctggctcaccttctttatgctttaataagcttttcccaattatcattccaacaataatcgaaaaaacgatagcaacaaatacaagtgttatattttttttcttcattttatcaagttccttagaattatatataagtctttagaactactatatcatattttcacgttaaaccaaataaaaaagaagagcaataagcccttccatcttcttattcacgtatttattccaccaatgctctcactgcattgataattctctgttgcttttctttaggtagtttctctatcatttcagataattcattcgtaacgccgctaaccgaatgtgtcacaacatcaatcaatagtgtatctgctgaaacatctaatgcatttgcaatcgcaataaaagtatcaagttttgttactttcagtcctctctctataacacttacatgagttggactcaagtttaccagtgctgccaattcttcttgtgtaagattcttagcttcccttgcagcttttattctctgaccaaccgcctttaaatccattgtgacacctcctttagaacgataattcggtctaaaattagtataacgattgatctttaaaacatacagaatctacagattgttaacttgttctttagaactgttttaaattaaaaaggcccaaaagggcactttcccttttgagcctatacacttttaattgtcataatactgaaatgaggcaacggattttccgctgcctcgcttttatcattttgagggtaattgaaaatatcctcctgtgttgagcaatcctctttatccttgaataccttacagctcccgcctttcagttcgtacttgcaaaagtcaatctggctttcaatgctgatactgtcctttcggtctactgactgccttgcgtaaatacaatcttctctgataatgtccatattgggctcctttccgtatggaattgagctaccaaccttacaactatattataccattagcagccccggacaacaatgttgcgattgattagcgaaacctgtccccgtatttgctgaatatatcgtacgggttattttcgatttctctttttcgtttcttcttttcctccggggagagtaccggcgtcaggttttccagcacaatgagcttgccttgaaaataaacagattgcttgtcgctttggtatgtaacagcttgaaccattgaaaacctcccttttccagtataggttaatgccgaccagtctccctcttgtccgaatggggaaacgtcaaaaaacggcaccccggaaggtgccgctctttgagctttccccagcttcgggccaacatggcccgaagtaaactcggaaatataaaaaagcgcccagacagcagaaagctactcgagcgcaaaaaatacggtattcagttacattgtgacaattttcgcaccggctgccagacgggggctgttcggtggctgggctttttttgacagcagtgcaaatacagtctgaatttgtcggcggacaagttctttcatgacggctgcctctttcagccgtgaaaagctctcatcgctgataatgtgttcaatccggcaggcgtcggcctccgcagtttcagggtcaacgcccgctgcgataagctgctcagtgaaaaagcaatggcgctcgtagattttttcggcaacctcgcggcccacatcggtcagatggagaaagtgatcttcgtccattgtaagaaagtcgccgtcccgtaaggtagccactgcatggcacacgctgggctttgacatctccatgtgccgggccacatctacggagcgtaccataccgagtttcttttggagaacaaggatggtttccaggtagtcctcaccggacgcatgaagtttcatcagtaccttttatgaattaaacgcttaacttccaatttgcagaagctgtctgcaaatcgaccagcctatgatagaggccattttctttcataagttcttcgtgagttccgttttcggctacaataccatctgacaatacaacgatgttatcggcagcttccaccgtcctcattctgtgagcgattataagaactgtcttgccttttaccagcctggatattgcgttttgaatttcagtttcgttatctacatcaagagaagcagtagcttcatccagaagaataacaggagcgtctttcaaaagagcacgtgcgatagaaaggcgctggcactcaccgccagatagtgttgaaccattttctccgatcaccgtctgatagccgtccgacaattttgaaataaattcatcacactgcgctgctttagctgcggcaatcacttcttcatccgttgcgtcctttttaccgacacgaatattttccatgatggtgttattaaacagcacaacatcttgaaaaacgatagagaagtttttcatcaacatggttgaatttagcggagcaatatcggttccgcccaacagtattcttcctccgtccagaggataaaatttggctgccagttttgcgactgtacttttgccgccgccggacgggccaaccaatgcagtgacctgtccctgttttgcagtaaacgaaacatccctcagtacctgtttgcccttttcgtaagaaaactggacatgatcgaatgtaatatcgtacccgtttgtatggatattcttctcaccggtttcttccgggtatttctctatttctttcaagcggttcacctgaagctgtacagaaaacagctctgccatatttgacatcgccccggaaagcggatcgtacaggcgggaggcagcaatcaaaaacagaatataggtaaacagagaggtatctccacttaccacaagactattacctactacaatcaccgttgccaaaccgagccgtaaaaacatctggccggttgtcagcagacttgccgttgtcatttcggatgaaatctgtgctttttccgcagcatccatctttgcgtccaatttgcgaagataatcttcttcctgattgcaagcctttatatcctgtacggtttccaaacattcctgaatgccttctgcaagctccagtcttgcgttcatgtgctttttgctgagtttttcctgccatttccgtgacagaataacgattgcaaatgaaatcggagctacccaaagaagagccaaacccatttgccagttgaaaatcagcaggccgatacaaacaatccccgtagagataactgctccaaagaattgtggaaccgtatgagaaaatgcgtgttcaaagtttgcacagtcgcccataattgtgcttgtcaggtcagcaagatctcgctggtggaagaagttcagcggaagggtacgcaatttttccgcaagcccgatacgccgccttgcgctttcatcatacgttccgagatatgtcgcggtgtactggcaataatgaaaaataaaaacaacagctaaaatcacaattccaatcacagtgtaaacggcggcactgatctctggcgcactcgctcccaaaacaggcgcaagaagctgattgaggacgatagccagaagaataacaggaaacataaggctgatattggccagcaccgaataaacaatcccttttaacaggtcttttgcaccctgatcgcttaacgcatacttcttttttaacgccttaatcatgctgctcatcctcctttccgaccttccaggcaatcgaggtctggtaatccttccacatagaagaataaataccatttaaggctaccaattcttcatgcgtacctctttctgcaatctgcccctccttgaacaccaggataaggtctgcgtcttgtatcgtagagagccggtgggcaatcatcataaccgttttgttttgggtcagccgctcaaaagcgagctgtatctgatgttcattttcggcatctgcaaatgctgtggcttcatccagtacaataataggggcgtcttttaaaattgcccttgcaagagcaattctttgattttcacctcctgagagatatgtgcctcctgttccaacgagcgtatcaagcccatccgggaggcggtcaataatatctttgcattgtgcttcatcagccgctttcaggacttcttccctggtagcgtccgggcgggccgccttaatattattcagcaaggtgtccttgaacagacaggtattctgaaacacgaaagcaactcttttcatcagttcctgcttctcaatattgcgtacatccacgccgccaatcgtaacggagcctgactgaacatcataaaatcggggaatgaggcttgccgctgtacttttaccgctgccggaggcaccaacaagcgccactgtttttcctgtcggaacctcaaagctgatatggtctaaggccttctctttggtccctggataggcgaaggaaacatccgaaaacacaatcgaagcatctgccgggatcaggggatgttccggctccttcaagggcttttcctgcaaaatttcatccacccggctgactgcacttttagccgccataagctgctcgctggcaaacatgatacggttcatcatagttgcacagaccggagtaaacaaactgtaaaacagaaaatccagcacaacattttcataagccgcctggccgctgaccccggacaaaataaacatggcgactggaataagtaaaacaaatgtgccgttcagtgttactgtaaatcctgtaagaggaatacggcattttaaggcatacccggaagcaaatttttcgtattcttctattgcagcgtgaaaatttttgaaggaataaatagtttgctgaaatacttttacaacaggaataccgcgaatatattccacagcttctttattcattgtttccagtgcagtcatatacttgcccataaactgcgcattatctccgcccatcatctgtttgagaaagatgacactgattcccataggtatcaggcagcaaattcccagccgccagtcaaaaaggaaaatcaaaataataacggcaaccggcataactgcggctccggtcagatcgggaagctgatgggccagaaatccttctgtaagccctgcattatcatcaatgatgtttctgagccgtccgcttgcattttggctgaaataccccaacggcagcgtcacgatatgatgaattgcagattttctcatattggtggctgtacgaaacgccgccagatgagtacagttcagggcgataaaataaattaaaatgcttgccgctgcaaacacaaccgccatccacgcataatgggcgctccccgttgcaagagatatatccccagcagcaaaagcctggattaaatcgcggatgacgagccaaatgcaaacaaaaggcagcatagataaaatggtactgattccggagagaacacatcccaaaacagtcaaaacatggaatttccctgcatatccgaacattctggacagttctccatttttttgtttctccataagcaagtctcctttcgcaataatagacgggttagcattttataacccatctattatcataaaatcattcggttgtttctgccactccatacagagcgtatctatctaatcggacacataattcattgacacataaggcaggagtataagcgggacaaattttcctgtaacggaaatgtttctacatgaccttcatcaacgaaatgcagaacccgattgcaagtcatagcggcaaattcataatcgtgggtaatgattaaaatggtctttcctttttgcgccagagctttcaaatgctccgatattctcatcatatttttgaaatcaagaccgctggtaggctcatccaaaatcaaaacgggggtatctatccaatccgatactgcgagagtgagtcgttgtttctgcccgccggaaagagtagcgggatgccgttctttccattcaaacaagccatatagttttagcagatcatcgcgttgctcctgggtactgccttttccgtttaatagcagttcttcttctacgctgtccccaaacaactggcaatctgtattttgcataacaaagtaggcaaaattcttccgtttgcctttagatacctttgtcccgttatatatgacctgaccctctttttccttttgcataccacaaagaatattcgacaaagtagttttgcctattccgttatgacctacaatcgcaatcagatcaccagcatacgcctgaaaagatacatcatggaaaaccggatgtttgcgataggaaaacgccaaatcctttacctccatcgtcatatctttttcttttacaggggaaatatctacttcaatatggtgcaaatctgccgctcgtattcctatggctcgtcttttttcttctggaatagagcgcagttctcccgccgtccattcttcttttatgctcccgttttccatatagagaaaacggtctgcaaggtcagtaagataataaagccggtgttcagcaacaatgattgtgtggccttccgctttaagtccacccatcaaatttttaagtgcctcaacggaatacatatccaaattggccgaaggttcatcaaacacataaatttccggatcaacagcattgacggaggccaccgctattttctgtttttccccgctggacatcggataaatttctttccctcgcagcatatctccgttaatacgcttgattgcacttgaaacccgcctatccaattcttcatacggaacgccataattttcacacccaaacgaaatctcatcctctgtaatactggcaaaaaactggctctttggatcttgaaagattgaacctacttttttcccgatttcatacagaggatattccgatatgttgcgtcccaacagtgtgatgcgccctttcagtgtcccttcgtaaaattgttcgcctaacccgtttaccaatcgtgttaaagttgtctttccgcagccgctccctccagtcagaacaagaaactcgccctcttttacatcgaggctgatatgatggatactatctgtttcggctcccggatattcaaaagatacatcttcaaactggataacggatcgccttgctttatcatttaccattacgctaccatcctttccagcacaaaatagaatgcagttacacaaacagcaatcacgcacataatccaatctcttttttgaaattctatttttctgcggcaggtatgtttcccaggattggaaatccccctgctttcagcagaagcggcaagttcttcggctattctggatgaacggaaaataacaggcgtaacaatatactccattgcgtccagagggtgtttccatgacaacagctttcgcagtcgaagggaggaaaacacatcagaaaattcactgcgcacagtagggaagaaacgcagcatgaaggttacgggcagggcaattccattaggcgcgtggattttcttaaaaactgctacaacttctcccggcggcataccaatcacgggctgcgcagccataaccatcatcaaaatacgcagcaccatgaacaggaacatttccggcataagaatggtaatgccctgtcctcctgaaagcaacctcaacacgataaaaataccgcagacgatcaaatattttattgtctgcctgccaaagccctgaataatcagatacacgctcaaaacgccaaaaagtgtgtatatcaaaatgtcgcttgtgagcaccgccacaagcgacatagtgagaactatgacaagcaatttggttcgaaaatcaaatttcatgctcatagtttatttaatcgcaccactctttctaaagtgcttcacaatcagtttgttactaatcatgcagccaaggacggccaggatagcggtgacagcaagactcaaaaggacgtacttcggattggtgtaatactgggtctgaacctgaacctgctgctcgctgacgccggtggcaagaaatgcgtctttgaaaaaccaaatttctgacataccatgtgcagcgcgaaccagtgccgtgattacccacgaaatagacacacgcttaatgtcatggtaggcatcctttccgcacatggaaagctctgcgatgataccgccgcccaaaaaccacggaatcataaatggccccatcatcaatccggcgataatcgcccacatgatattgtagacaagagcggggccatgcttgccgactttcatgcacatataaacatagaacggtgcgaggataagtgccgcaccagcggcgttaaaaatcatggaatagaacagtgaagcgccggtcaggatcgaatagaccataaatacaacgaacatgaccgcacagaagataccgatgattgccgcgtctttgacagtatacttgttacctgtcgatttttcattttccatttggaaatcctcctttgtcttgcagaaagttagcaacgtctaacccattattcaaaaaataggccagcttcaagcggtctttctgcttttatctgacaaaggatattctaatacagctcagatttcttcgccactccatacggacccgcttctatccaaacggacactctttctgaattccgttggagagctgccatacgtttctttgaaggcagaagtgaatttattcggattttcatatccgattttacttgcaatctccgttactgacgacttggtttccagcaacaattttttggcgacttgaagccgataggtacgaagataagaatagacagaggttccatagacgcctcgaaagcactttttcaatgctgttgtagaaatcgcgaatttctgggaaagctgttcaatcgtatgatgtgctgtcaagtcctccgtaatataggacgctactgctttaatcaatgcgacctgattttgattgaaataatccgtctgtaaaacttcttctgccgtattgagatcacttaagaacagaagcagttccagcattttgactttcatgtatcctggttttcttttttcccggacatgatagagttccgaaaaaatatgttcaatagacggattggcccgcatgatgcagcaacggtttccttcgcaaatatatttttgtatgtagtgcaaatcaatattcaatagctccatgatttgccgtacttccggcagcaattcatccagattgatgacgatagaaataccgtgatagtggttcagcggaaaacacgaatttgactttttcttcatcatggagctgatcgacaaatcgccttccgccatatagcagcaactattttcaccaaagctacactcaaaacgtcctatcagacaatggttaatctctatcatgtttttagctgtggcttgattttgattgcaatatcccatgtgcatatcgttatagtaaagctcaataccagaaaaaacctgatagactgtaatgcgtccatgccctgtttcatttgacagccgaaaaattttacagtcctgccgtagttcatcttcttcgagagagccgtataactttgtcccttcaaattcgtctggcaattcagaccgcaataatacttcaatcgtaccagagagtgcttgtttttcataggtcagcaccacccattcctcctttcggttcgttataactaatcactctaagtataggcgcgaataatggcagtgtcaaatggttttctgacaaaaagaaaaagttctaaatataaataaactcttgacaaatcatttcctccacctgtgctttcagcgtgttcatcagccccacccagcgtatggggtcatgggctttcagttcctcggtgacgcccgctgcctccatcatccggggcagcatggcgtccatccgttcctgctccgcccggtcaatctccaacaggtgcgggtacagcttttcgcttaaaatcaggctactacaaagaccggccgatgttctttcgagtatcattgcttttatataaataagacagttctggggatttttcagatattctatcattggaatagggtggtcttaaattcaatgataaccgcgcttttttaatcatatacgtttcactaccatcctccgaagatcctttcaaccagcaatcatccggatacttcgctgcaaagcctcgtaaccgtttcggcaagttctgattgaaggtatacacatcatagaatccatcatcttcattagtcagaataatcgtttctttttcacactttaaccttcgcatattctatccacgctttctttccatttcctgatccaggtactttggtatcggctttccggaccggcgagcaatggcaatctgtttctgatgcagtcgtttgattacagatcttcgtttcttagattttccatcctgttgatttcgggaggtctgattgttgctgctagcatcagaggtcttttcctgattcttcttctgattattcaccagaccgtccaccatatcataattggcttcggtaccagattctctgcttcgttcataagtgccgttctggtagaatttctggtaatgttccagacggattttaccatcttgttttagctgttcgaccggatttagcggtacctgctgttggatgtaatcatgaatcttttgttttgtcttttcatcgaatttcttacattcttcgacaaccattttcccataggcatccaggataacaccctgggcctgatctcggtatacctgatgttccatcaaataaaactgttttccatcaataatgatggtgtctgttgcaatccagttcccctttttcccatcaatctgataattctcagtttccatagtgatcagtgcaccggatgtgttgatacgaataaatccggccagatactgtggatagttctcatctacatagtagcagctgatttctccacccttgttcaatacgagcacgtcactgacttcgcattgatttttcgtccgtttccagatgtcagcgactttttcattttcctgcatttcatgaatcgagactaatcggtaattttcgacagtaatcgacacattctgctgtcttgcctcttgatatggcagatgccacagtgcttttcctgctgtctgctgatctactcggtagactgcaaattgattaagcttcataggcatcgtcctccaagttattcagataataattcagatccagagaatagtagtatttgtcttcgatctgctgtaattttccaactgtagaattgatgatctcaatcatttcatcattctcaggatcactttcttcctgttccaaaacttccaaagcttctttcagtgtttggattgtttcttcctttgtgtgctgctggaagatagcagtaatagtcagttcgttttcttccaggtttacatttctcataggctcatttccccccttttctttttcggtattggtttcatctgtatattcagctccttctcgtttttttcttcgcttatatttttttcgttatccactttcttattggatttcagaggattttccacatttggatgtctttcttccaagtacttttccacacgactgattgcattttgcacataagaattttctctaaatccaggaatcgaattcaaaaattctttctgtatttttccttcgatcatcagactctgcattccttcataatcacttccgtctttcagatcaaagccaacacatttcagtccatgcatacgttctgatgggattttctcataagcttccaaagcttctggtaatgtcaggtcataatgtacttcacccattacaggaaattcagcacattcagccgcataaaagctgatacatgtaagatcattttcataatccacattttctatttccgggacaatatcgagtattttttctctttgtgctgcaaactctggaagttctgcaaatccaaatcgatccacgtaatatgcctgcatatccccaccacggtttgtaatgataacatcactgaccgacatagaatgtgctttataatctgccggtggattatcgttgaatacggcatacaaatcatccagcttttcattttcatgtaatctgccagaatagacacatttataatttgctgcatcgattgtaatgccatcttctctgaccattgccatattcataaataaatgttgttttcccggtgtgccttcatccacatggtaaatcgtatagcggtcaccattacctctgaacatttcttcctctagggtataatcaaacttaaatggatacaaagcccgatcaactctttccgaaatatccgttccttctgcaatcgtatcttccagccaatctttgatatctccccatgattcaaactgcaaatacccagcaatttcatgtgtcccatccggtgccagtacaatatgtcctggttcgctttcccgataatcatagcggtatccggctgcttccagtgcatctaccagaatgccgtatttttcatgtaattctgttttttgtttttcttcaagaatgatttccagttcttctgtaagctgatcgatcatttcaccggctgtctttcggatcacatccatagatgctttcatttccttcatttcccggctgctactccaacctgcaatataaggaaaactgtaatccgatgtatccaaaccaaaggaagaacacacacagtaagcaacggattctgcttcaacctcttttgtcagacggtctttttctacacccaagctttccatgatttccttgtcatgcagtttagcatgggctgtttcatgaatagcagtctttaaggtctggctttcactgagtcctttttttatcacgatttccttatctgcattgtgataatatccattggcattgccatcgatctcatcgaatcgtatcggcactggggatattttctgaatagcctgcatgaaagaatcaaaatcctgtacagctgcagtcaataattccggtgccagtgtctggatcggttccccggatgtctgagcaatatcaaagacggtaactgctttaaaatgcggaactgtaacttccacctgttcagtcttaggttttccatcggttcccatgattggtcgctgattttcatccagaacctctttttccttcattttcttatatggtgccggtgcaatgattgtaattcctttttcccctttcatgacctgtctacccatggactgccagtttttgtagctggtaacaagtgtggcatccggtcgttgcatggcgatcagcattgtattattaaaggaataattgtgaaactttgccatggttttaagaaattcctgatagcggttacttgtaaaaagttcttccacaccggattccagtgactgcataatgctgtccatatcttttccctggaccggcagtggaatagtagtagttttattttgttctgtcataatactcctttccaaaaacgccccacgacattgtgtttatgccgcagggctttttattagttgacgagatgattattttttattagagttccatatcgtgcttctttgttttcggtttctgatccggctgttcttttcctgctttctctgtttttgcagcctgtgctcctttttctttctgacgttccgtaaatctgtcagctttttcaaagacgtgatcctttgtgtcaaagtgatatacatcattggtaaggcgttctgctggtgctacctgagtcgcattgacttctgtgaccatcatccttaattcatctgcactgacttctccattgtcaggaagaaccagcatttgatggattgatgaagggagaataaagtagtcctgtccaaggagttcacccagattgtccattacttccggatagaagagagcaccggcaccatcgattctctgctgatttgtcactacaaaaaagattggcatctgagcggattctctaatagattcctgcagtatttctctttcttccggtgacatcatgaacagatccttctcaaccaattcctccataatcgcgcccatggaagatacttcgggtgccataatacgtggagaacttttcatagcatcttcatgaagctgttctgctgtaatgccgtactgtttaagtaagtcatttttgatgagcatagaactcaatccttcctcatccatgctgacggctacgtgataggtaatcgcaagatcttcctttaactgatgcggaacattcgcaagcatatctttatttgtttctgccgatgatacacgaataaacagattgtcctttgcaatgtcataatccatgatggatttgagattcacctggattggtgcttccataaccacatctgcaattcttctgcatacgctttccatcgttacgccaggctgattctgataggctttatagagctgatccatgttgatggtcggtgtgatcgtttcgtcttcctttttcaccatcaggcccttgtaagtagtatttaatttctggtaatccataacggatacctcagcattctcataagcctctggtaaaaagagtctgatattgtcctttacttcatttacaaattcattaaaattcattcttcgtttcctcctctaatctgttttcttatttctttttgcttttgttttttggtttctttttgggaaaggataaagaaaaattcacctttccggtttcatctgtatccatatggagatctgcctcaaagtacatatttttctttctggaatacaggtctttcacatgcacacttccgtttttcagaagttctgcagccatctttttatccatggttttttccatgctctgcagatagcggttgtctttccagagagcaaagtgacaatcatggttgctgcaatagaagttggttttactttcatataccaggcttccacataccggacaggttccaatgctttctctggtctgaaatcttcttgtttcttcttcggaaatcgcatcgcatccattcagcatcatggtcagcatgtttttgatcccagtcataaactgttccggtgcaatctctccatgctccatcaaaagcaactggttttcccattctgcagtcatacttgcagatttcagaaagtctggcaggatctcaacaaggacttttccatcatctgttggaaggatctgttttccttttcgggtggcatattgggaatagatcagtttctcgatgataccggctcttgttgccggagttcctaatcctttcttttccgtatcttcatcgaattccttatttccagctgtttccattgccgcaaggagagtatcttcgctgtatggttttggtggcgatgtaaaatgttctgtcttttctgcagctacagcatagaaagtctgtccctgggttactttcggcatcctctctttcatttcctgatccggatctacgattgccatgcggtccttattcttgaagcagttttcaaagagtttccatccatcctgcagaacaatctttccttttgctttgaagatttctccctggcattccacttcaatctctgtttcctggtaaatgtgatccttactcattgccatgaccgtatggactgcgattaggaagagaatcttttcttcccaggatttcagttcatccagatggctggatgcaagctccatcgttgggatgattgcatggtgatctgtcactttgctgttattcatgactttcttcacatctggctgctccggctgatcaaacggacctgtcagctgatatttctcataaatctgacgaaccacatttcttgcggtctgttccatatcttctgtcagatactggctgtccgttcttggataagtgatcagtttcttttcgtacaggctctgagcggtatccagtgtctgtttggctgtcattccatagatacggtttgcttctctctgcagtgtggtcaggtcataaagttttggtgcttttactttcttttccgtttcttttactgctgtgacaatagcttcacttccttggcatctgcttcttaactgttccgcctcatccagatcaaagatttttggctttacagccggaattccatcacaatcgagttccacattgaaatacttttctttctggaaattgctgatctgtccggcacgttccaccaacatggcaagtgtcggtgtctgaacccttccaacggtcagctttttgaagtactttgtggtgtaagctctggttgcattcattcctaccagccagtcagcctgagaacggcatacagcagcttcggccagatgtcggtattcctctgcggatctcagatgctgcattccatcaaggattgctgaatcttccagagaactgatccataatcgtttcaccggctttttacttccggataagtcatagacatgtttgaagattaattctccttcacgtccggcatcacaggcatttacgacgtattcaatttccggactgttgagcagtctttttaagatatagaactgatctttcttatcttctgagactgtaactttccagtctttcgggatgatcgggagatcttcatatctccactggttaaatttctcatcgtaagcatccggtgaaacatattctgccagatgtccgaaacaccagctgaccatacagtcggttcctcttaaatatccgtcttctcgttcctgtgctccaatcacttctgcgattgctcttgatacacttggtttttctgcaattactaaatacatgatgtattacctccttcatataacgaaatggagagagcatgttttacagccccctccgctaaaaaagtttatttatttttcattttcttcaaaatcttcgtcttcagactcttcctcatccggaacttcttccagtccacctgtttccaaaccttccggctgatcatcctcatcttcctcttttttaggtttatagatcttgaagtagtagtaagctgccacaccgctgagagccaaaatcaggattgttgccattgcacccatattggtttttgcagatgctgttttctccggatcaatggtagcttccttgtctacatcctcattatttgtttcatccagcactacctttgatttatctggctgtggtgttacgacagtagcagtgctgtctttatccagaaattcggacagatcattctcatcaatctgggataacatatagacattctgtgctgtggcactacggtcgatcacgatatagaaagtgttgttattcttcgttgtaaccgtaagaaattcctttgtggaatcatcggtaatgtcatccttgacttcaccattgccaggtgtcgtaaatgcagttcccttgtctgttccatcttccggcagcacctcgtttgtgtttgtcgcctcgtcctttttctcttctttgtctgttgactgttccgtctgagttgtctctactttggatgcctctgccgattcatccacataggcaaatgctgtggttgatgctgtaaaaagcatcatgactcccaacagcagtcctgccattttcttattcattttcttccatttcaccattctgatattcctccttattttcttctgtgaatacaaaggagcctgaaccttcatcgtcagactccctgcttacctgaaatttaacttttccactctggataccatccaaaagatcatataactgatcattatccatcttcataccacggatgcacctgatcatctcattgtcctcttcctgctttaatgcagcctggacacccctaagatattgctgcagatccgcgatctttttctctgtcttggcaatctcatccagatattttttaatctttttattcaaactttcacctcccttcgttcacccctttatggcagtcttccaaagcacatgaaatgttgctgccagtaggatgtgctgatatttgagtaatggatcggatccccgcaatggatcatcatattgttaccgacatagatacctacatggcttgcaccggatgtgttatacgttccctggaagaagatcagatctcctggttttgcttctcccggtgatacataagtacatacgcctcttaatccttccgcggtcaatcgtccatagttccagccattaccacagtggttaatgacataagatacgaaacctgagcagtcaaatcccgatggagagtagccaccccatacataaggtactcccagatatttttccgcttctcggatcatccgggcaaattcttcatcctgcagtgcttccggtggaatctcatagctcattccattaccgcctgatccactggtcacattgtttacatcccacagataatttctgtttccataggtcgtatttaacgcattgtaaataatcagctgttctgcattcagattggctcttgccacagcgtcaaagcttccatttgtcagtgtcacatatagaatcttcttagtgcttgtactggtaaccgttacttcctgactgccattgtcatctgcgatataggcttcccaggtctgatgtccatgagcagaagcggcagcatggttatcatagtaaacgtcaaactgcaccccatatcgtgcaaaggctccggtatcctcaaccgtgtattccacaccattcattactacctttgttccaatcggtacaaatggattggatgcatctacagcaatcgtatggtttgcagtaggatatgccccactggcagttggacctccggaccatacaccacaacagattcgacaattacaatatccgctggtcactacctgtcctaatgattctccgactcgaacatttctggtttctgtcaccgtttctgttcgaccttctgtattcagatgatattgtgcttcaaaaagagcttgcagctcgttttcaacatctgagtacgtccagtccccgtattttgcggtaagatacgagataagatggtatggattatgaccaatctcagcaatgttgtactgatactcgtcataattcggatgtcttcgttccatctcattgatctgctggttcaaggcactttccaaagcagcatatctgttttcggcagcatagatatcctcgtctgaacttggatacgttgtaataccgatcacagatccagctccctcgatagaagcactgcagctccccagtgatactgaaatgactagaaaaagaagcgcaaaaataccgatgcctgcgaacatggcacgattacgctttatgatctctttcaaggcgatctttgcttttaccgtcatgttctcgacaccggcaatggttgttgctccacccagactgccagcggattttccggctctggctgcccggtatgcatccttatatcgttttttctgaaagaagcggttatagaaatgtctcttttgctcagcgttctttaccgattctgtatgtttgactccttccatactttctgcagaaccaaatttcagtttcttttctacagtagcctcacgataacctctgcgatgggttttcacatccgttcgtttgctgcggatctgagcatgacgtaggccacgtaacgcagcttctgtttcacgctctgcaagtctggcactttccacacctgcattttcatctgtttcttcctcttcggaagtgactgctttcatgccagatataacagcttgtgtggcaatgtacttcccggctgtccctcccggtttcatgccagcacctttcaccatctgatttccttcatcatcaaaggataatcttccggcttttgcctgttctttggtcatctgtttttgcagctgcttcttccgaatggatttcttttggctgttcagattattatcatcatccgggattttttcatgacgatgcagtttctttcgatatccggatactttttctttcggtgtgacttcaactgtatcctcaacagcttcctgccggacagaagatttccggatcttttccatctgcagtcgtttaccttttccagattttgaatcttcattctcagcctttttccgttcccgttcaggaataaattcttccttattttccggtcgtcctcggctcctgtgactgatatcttttacactaccatcacgaagattttcttctgtcagaccatccctggtcatctttgcgacctttttatctttgcctttaaattcttttccagctataggtcatcacctcctggcacaacttttctttctgtactcattcagttcctggcatcctataatcgggataccaggataaccatctgcctgtgtcctgattgctggagagctcgcctggatatgaaatacccagttcaattcactcggatttctcggccagaaaccattgatcagcatagcctccttgaactgattgttgtgcagatggatctgggtacgtttatacaaaacttctttcagatcatcactggtaagatgcggatagattttctgtgccggataaaaattccagaatacccagtcaaggataatgttctgtgtttccagcggaagttcatacagatgatgatcatcattgactgtatgaacacgatatccaggctgtgcattttccagatttttcatctgaatgtaaggattatcctggttccactgcctgattcggatcttatcaatttccttcatgtttttccgcctccatttctttctctcgtttttcaacttcttccggttttgtagtcatcaaactgtacagcttcaaggtcttatcgaacttgtccttaaatggaataattgttgttccatagaaaagaagtccttctccttccccggaattcgtcacataagacaactgatatggggaaatattcagctgttttgcaaggatctgtctgtcacctgcagcctggttcagcatcaagataaaatcactgttctcaaagatattttcaatttccctgctggcaagaagatctttgatattctgtgtgattccagtcggtacgcctccccattttctgaatctcttccagatttctacggaataagctgctgtctgttcttctttgagcagaaggtggaattcatcgatatagtacctggtggatttgatgccacggttgatcgtaactctgttccatacctgatcctggacgatgagcattccgattttcttcagctgctttccaagttccttaatatcaaagcagacaatacggttattcagttccacattggttctatggttgaatactttcagtgatccatttacatagatttccagtgctgttgcaattctctgggcctggggttctttctgctttctgaggcaatcatacaggtcaccaaggaccggcatattttccggttttggatctgcaaagtacttctgatacaccagtggaagacaacggtcgatcactgatttttcctctgcttcaataccatccctgcttcccatgatcagctcacataaggacaggacaaaatcggattttacaccaagtggattgtcatcatcggaataatccatattgatatccatcggattgatataatccttactggttggtgagatgtgtaccacctgtccgccaagtgcatggaccagtgggtaatactcaccctccggatctccgatgataatgtcatccttcgtgacaaagaaagcgttggtgatctctctttttgctgcaaaggatttaccggatccaggcgtaccaaggatcaatccattcgggtttttcagctttttacgatccaccatgatcatgttgttactgagtgcattcaatccgtaatataaggattctcctgccataaaaagttcctgtgtcgtaaacggaacaaagatcgctgtactggtagtcgtaagagcccgcttgatcgggatatgatttactcccaacggaacactgctcatcaatccttcttcctgctgataatccagacgtttcagtacacagttatatttctgtgcaataccggccgtctggaagatggcattatccagtgcctgttttgtctttgcggtatttaaaaagagcgctgttacaaggaacatacgctcatttcgtgactgcagatcttccaaaagacgtttggcttctccgccatacgtattcagatccgatgggatgatatccatatcgtatccggatcttaccgcctttttctgctcttcaattttcattctgttgatatccgtaaccttgctttttaccagcttgattgccttcatctgatccacagactggacatgcagattgacgatgagattcttatcaatatccagaaattctgcaagcatcttatctgtaagctccggtgccaggatctgcaaataagagacggctccgatagtatttcccatgtggaatgtatttctgtccttgaatacaaaactggtcggtgccacataatctttggtattgagtcctgtacggatcatggaaccataatcaaactggaagtctgtcatgttatctggattgaaagtctcatataaaatctgcagtctttctaccccattcaatggataagccggaactccaaggatcttgaagttgttcaggatatccgactcaatacgttccagctttggctttgcttcccggatattatctgcttcgatggaaaaggtgatatattttgatttcaccagtccattatttcctttcgccagctgctgtttcagcatcttggcatattccatacgaacatcgtcaaaagcatcctcctgaggacggatccggatgacctgttcaaattctttcatgctgcttttatgattgataaagctcagctgaaaatggatactggcatcaaagtaattgaggaaatcgcaccagttttcaaagattgcatttttatcttcgttctgagccagctggtagttgatgtcataaaagcggatacacttagaatacgtttttccctgtaccctgcagatcccatctcttcccatttccttataagcgatcgactgctgaacggacagttttttctgcctgcgtttttcttcctgcttttcttttttctttttctcttttctgtctacttttttgtacccggtatctgcgacagttttcttatttttcttttttcgcaaccgtttttcctcctttcgtttttcctgcatccggagactgtctgatctgttccggatctgtttcataatagttttcagtttcatattttctgacgggtggacgaagaaacttcacccggattatatgcatcagaacatcttccagatgcatcccgtctttttcgtacatggcaaataaaaatgccggtaacatcaaaagcaccatgaccgttgctgcattactgtttcccatcacattacgcaagaggaaatagcttggaattcccattgcagcacctatcccgatacagatcagctgtcttttggtcaggttaaatgctactttattctttacctttgttaaatctttcggtacgctgacatatgccatgattttcactccttcctgtaatttagtgcgcgttaaatatcgacttacttaaggatgccgtcttaaagaggctgtaacataagatcactgtgtaagccataacgccaaataatgaagaactcagattatctgaatactggatacctgcaacaagcactgcatagattgcaacgcataccatcatcagaaatgcctggaaagccagggcaaagagtcctctgaaataattcgtgccgatctgtccccattctctgttactcatagttgcgaatggaatcggcgcaactgaggtatataggtaaatctctatcatacgtccatacatgatcactgtgatcagtacagacaggatcttcatacagaagccagcgataagggtttccagcgccaatacaacaagttctccgatttccatactttccagtgttgcggaaagatccgtcaatgccgaagaaatatcaatggcggtacttcctgtgataacaccggccgcagaattaactacgtgctgacccacatcgaataccgccattgtgatcgtaaatgtgttactcaccagatatacagcgatccacatttttacgaagtacttgaaaaacatccaggtatcaatatcatgcatgttgttgcgctcggtcagcatagaaatcaattcgtagcagagtacgagtgtgataataatacctgcgatcggcatgatcacagaatccgataagttccggatcatactgaatatgctgccgttccacccttgcggggtctgtccaacctgggtagcgatctcaccagtcttttgattgacatcagtaaacatcgtgttcaggttggaagtgatcatcccggttaagagttccctcatccattcctcaatcgcatcaaaaatctgactgaacatggatctctactcctttctcttaaccaaataatccactcagaagcgggattagctgtgttccgatcaggataacaccaccaccgctcatcagctgcttaattccctgggattttgcacccgggttgtcgtttccataaccttccatcaggttgattacgccccagacaccaagaccggcaccgattgcaacgaccagtgtctgaaggatattgattgcactgctaaaaaaagccataatcaaatgtatgaacaaacgcttttcttatggtctgtaagcgtttggctctactcctttcccttttattcagacctttttgtacccttatcagtagtagcagggggctcgaattctttctttcatatcagtcctcaccttcctcagcttcaatcgctgatacatcttcttgtgttacagttacttcatacatttcaaattctgtatcttccgacatcaccagtcggtgtgccagatatttttcgatatcaaacgcattattcttattaaaatcggcaagctctttgtaccgtttatgctttgtaatgtcatatttgttgcttaaaaacggccggactcctcgaagctgtaagatacatttttctccatccatgaccgccagctcatctctactcatcagttcttttccagtcttttgatagttcagcccataggaccggttgctgcctctggtgtctgatgtgttgtaaagatcaatggtttcctttcccagggtttctgatatttctttcagtgtggaactttcctttccgcccaggaaaagaacggtgtcacagttgcctgtgatcgtctcagcagcatctttatagatagttttcagctgagattgtgactgcaagatgatagaagctgagatttccctgcttcggatcgtagcaatcaatttgtcgaattttgggatctgtccgatattgctgaactcatcaaggagcagccgtacatgatagggaagcctgcctccatgctcatcatccgctttatcacaaagcaggttaaagagctgggtgtacatgattgctaccacaaaattgaatgtgtcatcggtatcactgatgatgacaaacatggctgttctctgatcaccgatcatatccagttccatttcgtcatacgacatgatttctcgaagctcctgaatatcaaatggtgcaagtctggcaccacaggaaatcaaaatcgacttcgcggttttgccggcggcaagcttgtacttgcgatattgccttactgcaaagtgttccggattttctgcttccagttcttcaaacaattcatccactgcatttttaaattcttcatcatcctccctggtctcactggcattgataaattccaacagagtagaaaagttctgttcttcctccggtgcctcataccagatgtatccgatcagtgcagaatacaaaaggcgttcggccttgacccagaaatcttccgttgatttttcgccctcacccttggtatttgcaataatggtattgaccagctttaagatgtctttttcactccggatataatggaacgatagtgataggtaaccctttgaaattatctccgggttttcccccacttcacaccggacatgcgactttcaccgcatccggcgttccatcaagcatagtttcagcagtgatacacaatcactctttcacattggctaagtttgctactttgccgccagtagcggcagtcctgcggtagcacgcagtttgttcactttggtaataactttggcattcagagagtattccttcaccaacgccactacagacatcatgtcttccgagctgactattgccaatccctgcaaagaaagaagcaacaggttctggtagctgtcattgcccttcttacaattgttcgttttcctgtaacagatacaggtttgaacatccagtttcttcccggtgattgcacatttaccgtcttgccctgcatagagggagacccggttgtcgttgtatctcactgattcggtcggtatcggatgcctcatcagccagagcattgattttacgtcaatcctgagattatcgtgtatctctgctctaccttcgggcgtatacggattgatttttcggcttttccgcattggaatcttgaattgcacgtaggccaatggaaccagtggcgtttctccaatccatcgcatttgcttcgattttccgtaccgtttccttagatatctgtttttgatttcgccctgcttcttgattccgtcaatacgatggagaagctgtccattgattggacgggcgatatcgctgaaattcaagttgacccttgtcgcaatgcagtaatagtcctgcactccgataaccttggcattatagtcccccacattcaggcttatttcttcagccgtcttactgctttgtattgccttgacactgtcagccatttccttgccgattctgtgtatggctttatcgcagacatttgaagttatcacccatgagttacttttgcgccgcagttttatgcgaaaacccagaaactcactatcacgctttctgagattagtcacttttgacttttcatcagacacttccagttttagccgtttccatagccagtctttgactgcataataggttttctctgcatcctctttggttctgcaaaatatcttgaaatcatccgcataacggacaatccgcatctccttgaggttgcttttcttcaaggctgtatagctgttgcactttttctctgcgccgttgggatagtaggtcactttacacggatgtttcatgtgcctcaccatttcatcccactgagaggcaatccaccagtccagttcattgaggacaatgtttgccagcaatggtgaaaggataccaccttgcggcgttcccttggatgggaggacggtttccccatcaggcatttcgattggcgctttcagcatggccttgatgatctgaatcaacttggtgtcccgtatacctaaagtccagatctgtttcagcagctttctgtggtcgacgttatcgaagaatcctttaacgtccacatcgactacatagtgaagcttgttcctttgggcgagtccatacgcataggaaatcgcattttctgcgctccgacacggtctgaacccataagagtgctcatagaactttgcttcacagattggctccatgacctgcaaaatacattgctgtactattcggtcaataatacacggtattcccagaggcctcatctttccgtttggctttggtatttctactctttttactgcttttggttcatacctcctgaactgtttctggatgagctttacaaacttatcctctgacatgactgccaatgattctattgtccgcccatccgtgcctgcggtatgactgccatcattgcctttgatatttctaaatgccagcttgatgttgttgggggcgctgatgatatccatcagatgcccaaagacttcaccgcttttgctgtctgcatacagactgtcaaaggttttctgcatgtcatagtattccgcatggcgtagcttgcttttcttcttagctttttgtgccatgtacatcaccccatttctatgaaaccgagcgacaatttctttttcttactcgactgcatgaatagtggttgtgtactgctgacgttttgcctgacttgtggccattcctaaccgtcctctttttcgcagacgatatcatcggttcgaccactgcttttcagcaggaattcatccgcttattattcttcgccggattatccagtagacttcctgcctttccttgttccgataatcctatctgtacatacatacctttaggtgttccctctgggcctgacagcttggacacgcctgtaacgtgccacggcgtttcgtaacaaccatttctactaagccgtactgcctgggctttaacccacacgcccatttctgagcgtggcacttttagacctttacattcgggagtttcgtcagacatctctgtcattctcaccatgggtatcttatagacccccggcatataggatgcaccgtccacctctggacagctttcgtcagcttaacctgttacggcatctctctgccggctttaccgggcttcacacagagtttggcctctgcatgccggagtatcaggggaggcgtttcagggcgttactccttcattccacctctcgaattatcagttcacagaactgattgaaacagcgctgtgcgccaccttttcagcggcgaacaagtcgcacgattgtaatgcatggactttttaaagttgatcgtatttaataccttgatccggtatcctccatttaccagcatcttcccgcattcaacgatgatcgttcccttcggatcagtgaccacataggacacgtgatccgtcatctgcataagattgggttttacatagaatcttgtctttccggatccggaaccaccgatgacgatcacattcttatttctggcatactttggggcttttggccggctgttcatggtcagacgttccgtttctgtgaggatgacattgttttcaaagaccggatccataaagggttcgatgtcttttctgtttccccatcttgcagatccatactccacaccttgtcggaacttctttgcatttttagaacgatagtagaccaccagttttaatgcacctgcaaccagaacacctactgtaagatcctgcaaagcgatacttggcagccagcttaaaaatgccagtcggaaattgactaacatcacgccaagtctctggaccatgctttctcccaggcaatgccggtacagccagaatcctttatctgctacatagaagataaagaaatatgggagatttaagatcaccagtcgtttgacctggatcttctgtaatttttcccggatcatcgttcctgacctctggatttttgtctctgcttcacacgctggcggtgctttgcttttctttctacagatttctgcagtttctttctgacggatggtttcttcgcctgtttctttttcagttctactccggcatattcccggaaagccgctgtcatcacatccacatctttagccttaaagaagaccagatattttggtggatcagcaccgacttcttttttcaggctgtaatcaatcccgtactttcttgccacacggtcaaaggatttgatattttcatctgtgatctttatgttggaaagctgtactccctgtgcattcagttgcttgatggtctgctttccatgtggctttttcttttcaatcttttttcgggctttttcccttcctttctcctgagcccgtccggtcttttcagccattttcacctgcgttgtttcctgtttcctccggttgtccatttccaggaacttccgaagggctgcttttagcacactggcagtgatcttgactccctggatgctcaggctgatcactttctgatttacttcttcctgcaattacccacgtcctttctttcctttcatttcagaatgaagacgggcaatacaatatccgatgcatggaacatgttttccatacggacagccaccacatggtgttgtttttactgcttttttcttttccggaagcagatagtggcactgtttcaagctacagcctttctttttgcctccccaccagtaacagtacttgcaggaccatggcttttcttcgctgtactttcttccctcaatagctgcatttggttctatgatcagatctttattagtcttcattctgttcttcctcttttctcatgatttctgtcagttttttctctgcctgacttccggcagcaatgagacaatacaaaactgtaaatattgccgctgctcccagaagagcaacaaaaataatgatatttctcatggtttctcccatctaaaaaagcgtccacagattcctttcggtttccatgaacgctcattcttatttaattagtgtttcttttttctcataaatgcaagggctcctgtcccagtcgcaccaatgccgagaagcataaaccacagccacagattggtgttatccccagtctttggtgaatcactgacaggttttccaccttcaggtgtcttttctgccggttttttctcatccaccatagttacatgctgtacttcacaggtatcctttacttcgaattccacatcttttgcaaccagatagccatccggtgccgtttcttcacggagagtgtattttccgatcggaagcatttcgatgtaatgtgctttctctgtactggtccagctttccacaacttttccatcccgatcaaggattgtgagtttcgctcccggaagttcttttccggcgatatcctgtttggagattttcaccttcgttacatcatccttcatctcaactttctgcacatcggcagtatctttgatcgtgaactttacgctttcagctgtcacgtaaccatcagcaggttttgtttcaaccagtgtgtattcttttccgacagtcagctcacggatcacatgtgcttctttaccggaagtccattcatccacgatatttccatcagcatctaccactttcagcttacatcctggaagttcttttccggttgtcagactggatttggtaaattcaacgacggttggctgattatcaaaggtaaaatcataagtgactgtcggctgatcttcacctgcatactcaaaggtaaattcctttacttcatcgttggttacgaatccgtccggtgcatagagctcttttacatagtaagttgctcctattggaagatctgcaacaaatgtgatctttccttcttcatccgtagatttcagctcaatgatctcatcggcttcgatcaggactttacctgttgtctcagacttaatgtcttctttggcaaataatccaaagatagcgccttccaatgtacggtcagaatctttttctttcttaagtacattgacttctactctctggcggttgttctgccagtctttgtcatagactacaactggtgtattctgatccacgtaagtcagatctacatgacgaatctcaccatccagtacatgaccgtaagcagttcctgtttctttcacatagtatttaccaagtggaagattttccagttttgcaataccggtttcatctgtcttgatcgttgcgatcagttcatcctttttatagtaatcgtcactgacgccatcggcagccttaatgtcttcctcagcatagacttcaaacgtaacatctgtcagttttccggttacatagttgaaaatgtgttccaccacacctttgaccttatcggccagcgtaacagaatccagaaattctccctttttgttgatgatgagttcaccaaccggtacctcgtccttcatttccactttctgaacctctccggtatctttgactgtgaatgtcacatcattggctaccagataaccatgcggtgcaaactcttcatgtagggtataagtctcacccactttcagatatttgatcacatgcggtgcatctttggaagatgtccagctatctactacatttccatctttatccgttactttcagataagctccatccagttctacaccggttgttgcatctgattttgtgatctcaacagttgtcggctggttcttctttacggattttaatgttactgtctgtacatcctgcccctgataagaagcatcaaatctcagtacttcatccgaagatacgaatccatctggtgctttcagttcttttacataatagcttccaagtggaagatccagtgtacatgctgcctgacctttttcatcagaagtcatttcctgtaaaagagtatctgctttgacgatcacttttccatctttcgtctgaatgtcttttgcattgtaaataccgaacactgctccggctactgtattgcctgtctcagcatcctgtttttcgaccgtaatcgacactttctgtcgttcatctgtgacagagatttctttctcgatcactgcggtatcctgatctgcataagcaaattcgacattttccggcaccgtatttaacacataagtgtccggtgcattcttctctttgacatagtatctgccaagtggaagattctttacagttgcataaccatctgtatccgttgtaacggttgccaccagtgcatcctttgcaaagtacaaagttctctgtccatctgcatctacctgatgatcggcagtatagatatcctctgccgcatagacttcaaattcagcacctgcaagtccagccatttcatactggaagtccttatcaaatccctttaacacttcaccctgtttatagatctttaactgacctttgaccggggcattggtatattccacatcaatgactgcatctcctgtgacaggatcggtcagataagcagtatctgtatcaactgcaactgtcacatagtttttggatattgtgtacccatcgggtgccgtcacttcctcaatccggtagttgccaggtttcagattctttggcagtaccaggtatccttcctcatttgtgaaataggatttgtgtaccgttggcttcggataggatgttgtctgttccacatatttctggttatccaggtcatataccttgaattctgtatttgccaggagtacagatttctgtgtttctgcatcctttttgatgatctttaattttgctttgaattctttatccagaagcactcgccatgtctgcggtgtatccggatgattctctgtgatcttcactataaaatcatcaaccggtgcatagttgtgtttgcttgtggtttctcttaccacataagttccatatggaagcggaatcgatcttgcatatcctttttcatcggtaaacatttctgcctggccatctgcagtcagtacaactggtctggctgagtcaaaatcataacttccatctgcttttactttcagatcactgacaagccatgctgaaaaaccaactccctgcagaagatctgcatcggtcttcccgttgtttgctgccttgatgatctgaaatggctgtttgatgacagtttctttacatacagaagttctttctactgtcggaacagtagcaccttcgtaagtacagtccacctcatgttctgtcggatccagtacgtatcccaccggagcactaagctctttcagataatactttccaagatagagatccgatacagaagcttcgccattcttatccgttgtcagggatgtgatcaggctgtctttcttatggatcgttccggttcttccatccggatgaacaatatcttcccttgcataaaggccatatactgcaccttccagcgttgcatcaccctgtgctgcattccctgtctcagcatcctgttttgcaatgttgatctttgcatttacacgtttgtctgttacatttttggtcgttgtctttccgatagcaagagtcacattataagactttgtatcgatctgataccctgttggaacagagatttctttcagataaacaacttcctgtgttttctccattgtgagctgtgaagcaccattctgatcagttgcaggcatctctgcgatcagctttgtatatgcagcatcggaatagatcccgtacactgcaccagccagtgcatttcctgtatcctgatctttctttacaatggatactttgcattcttttgtccagattactttaaaatccacatatttctcatttccgacaccttcaccgaaaacaagagccaggtcctgtgttccggatcctgttacaatcttgtaagcagagtattctttatcaatgcttcccttcatccgagaagaaaatgtagcactgacgctctctgcctgatcaagtggtgctgtcagataaaactgtgtacctccactgatttctacacttgctcctgcagcacttgttttaccggttgtcacatttacaagctttacaccgcttggcaacttaaatgtgattgtctgcagtttatctgctttgaatgtgatcacgcttgttcgctggctgtttccttccacataagcctttacattagattcggaaaagctcatatctacagacggaatgtccggcatatttacacaataattgtaaagttccattgccaggttctttcctgttgcattggttccggatgcccagtcactggatccatttgcataagctgctgcaagatgggtaatgatgaatctctttcctgccggaaaatccggatgtttctcatcgaagaaaccattctcatcacttgcttttgttccgtaatagcagacctttgcaagtgtctttccatcggcaagtttctggattgtataagttccatttcccggtccttttttcgatggttcaacacagtatgctgtcgcattgatgcttccccatttcacataatacggacaagtcagataagaacctaatccataatctgcgtaatagtaccaggaaccggctgtgactgtgactgattttgttcctgtttcaccggaagcaagcatcattggcatatcaaaagtaatactttcgcctgcttcaagatccgcaagagcaacttcctggtcaacagcttcctgcataacctctgagagtgtgatccctgtttccggatcaacggtctcctgattctccgttgcttcgatctctgcatcaaattctttttctgtcagttctgttttgctctccgtttcagcagcaccagtttcctctgtagacgagtcagcctcagaatcctcagtttctgtcttatcggaagaaccagcatcctgatcagaagaactttctgactgcgaatctttctgctgatccgcttcttttaccacgatctttcgattgatctggtaggttgggtgatccgttgtctgtggttctacataatagactgccttataggaattggcataatcggtagaaaaatcattcccgtccgcatcttttgcttcctgaaatgtaacttttactttgctgtcatcctggatcgtaagaccggtataatcactctttacatcgaaattgtctccaaccttgatctcataatcctttgcagttaccacttcatcttcatccaactgatccttgatctcctcataatacggaatcttttttacagatccagcatcatcagaagcataggcaacagcgggagagagtaccgtcgatagaaccgttactgcagtcagtaaaccggacatcaccctgcgtgctttctttttcacgttcattctcttaaatccttcctttctgattcttttgtgtatggttatctgttagtttctgcatattatcttttatacgaagatgatcgcctcctttcctgaaatttgtgctatttgggacagtcagcacaagctgagataacagcacaaatatatggcggtacctgtttgtcacaaatatcgccacatgatttctactgtcatcctctttttagattcagacattttattttgatttaagatttaagcgttttcctgttttctttcccggatccgttcctatatcagtttccatctctgatacgttttcttctggcagacacgcagcttttcgctctatgcatgttcaaatcaaatatcactccgggcaggctattcatttttcaaggtacatgaaggtgttctatgcaaacccttcatataacgaaacgctcagagcctgttttacagtggtctaattcaatttttttgaaatttttttaaaattcttcgttttccgccttttttttcatcgtttttaatgctctgttcaggaggtcatttacactctgttgtttgattcccagataatctgcgacatcctgctgacgcatttcttcgaaataaaccagattgagtaccatcttttgcctctctgtcaattccttgatcagcgcatgcagaatttctctgtcgataacatcgtcaacaaaatcttttgaagatcctctcataatctccgcatcatctgtaacatcgctgttagaaaacacaccatgattggtgctgattttgctctggctgtatgccatacggtcttcagcctccatcagcagacggatataccagttttcattatcaaagaactctttattgaattccttgttatcgccagttacactcacatattcatagtcatcacaactatgaagcggaaatacggttgattgatttcctgctgtataaagtacatatccgtgatcataaacagagattgttgtatctgcattgatcatttcctttactacaactttgtgttccttcaaggatttcacgcttgggattctcttctccacatcagcaactttcacgatttttttcagttcttttaatgtcaacataaagaccacctttctgcctttcggctccgggtggtccattccatcttttatgaaatttctgcacagacataaagaactgcagtacaagaggtcacgaactcacccgttttttttgaacgggagtccgcgactcctttgtaacgcatgtatctgcgtttagattaagtttgccagattgcctggcttattcagttgatatgtgcatcttctgattcattctctgtttgctctttgcgaaacatggaataatcgcccatagcatcgtaaggacaatgccttacaaattcctggtattcgatttcagtcatctttgcttcctcctttgtgtcatattatcaaaatctctatttacaattatttttgcaaaaaagaattcaacctctatataacgaaacgctgagagcctgttttacagtggggtacgacaaaaaaatttaaaaatttttcgaaatacgtcaaaaaagcccgacaaaacaaatacttcaacaatctccaaaaccagaaaatacttctgatcttgcagtgtatccgtaaatgttttgccgggctcttagtgattccagtcaggttcagctccttgacaaactcttactgcctggtgcgttcttgatggttcctgccaaatccaacgcttactacagacagctcattctattctgttatgatccctgattcatcatctttcgggaatacgtccgcatcctggactttaattgttcatctcggatgtggatcggacgaaccgacaccatatcatcctttacaaatatctccaatgtactgcgacattttttgcactccacttctgaatcgctttgtgcgctcttttcaataaatgctccacatacagagcagtgtacatgccatttaatagcacctgatcccatataggcttcctcctttaagcaataagatatttctccatttattactcaacggaccaaagggaaatcaaatccgccttatgagcatcatgccatccattccgtaagtgccaaagctacacgaacagcacgatttctattctgatcagatctgctttgtcgatctgtgcatccttttttatcctttcaccagctaccactcactctttccggtataaaaaattccgctgtgattaattaacatgatatttcaatagtttcaaatacatcaccagtcagatcacagatgtcctggatctgaatctcggtatcatcaatccgtaagtggactgatggatcaaaaaattctacggttccggataatgtatggtactggccaactgacggatccttccaggatttttgaaaataagttgcctgtatcttcatcccatatgccaggatccttaatttcatatccaactcatttttcttttcctcagataaatctctttttggttcataaatgatttcctgttgccggattgtttcatccagtccacgaagcgccgcaaatggagcaaactgttttgccctgcgtcctacatccatgggatgtctcctggaaaccggtcttggtaaatataaatacggttgatatgcacttgccagcactttttgcacctcctctaagcacggtgaccacctatttgctcattgcgttctctataagtagaacactccagcaggttggatccccgcatgatcgcattctttccataacgctgctttacattcaatactgcttcctgtaaatgccgttccttatcggtctgtttgggatcatcaaacaggctgtactgcacataactttcaggagcaaccctgttcgcacacacctcgattcttcggattccggtatatctgtctgtaatcctgagatataaatcttccactgcatctatgatctttttggaactgttactttctctttcgagttttacggttcctttggatgcctcatgctcatacctgtggtcatatgcgatccataaggtgagagagcttgtcaccagtcctttttcaaacagatccagggccaggttgtctgtcatttcccttacgattacaagtgcttcttcaaaagaataatttcgcatcagcacctgaccatttgaaaggctgtgttcctccgaatgatagttcttgatgtcactcatccggcatgtttcatagccccatgcatgatcgatcaacagctctgcatcaatcccaaacatcttatacagccagtcttcggatcttaaagaagccattgcaatatcgcccatcgtatgaattccataaccggccagttttttttcagtccgggatccaatcctccagaagtcacttaatggtttatgatcccatagctgctctctgtaagagaattcatccaggattccaatatggtcatccacatgctttgctacgatatccattgcgatcttagcaagatacagattggttcccacaccagcggttgcagtgatacctgtttcctccataacctcctgcataagctttaccgccatttcttttgcagtgagatgataaagctgcagatagtttgtcacatcaataaaacattcatcgacactgtacacatggatatcttcttttgagacataccgcagataaattccatagatctttgcggaataatccatgtacagctgcatcctcggcatggctgtaatatacttcacacaatccggtatctcatggatccggcaccggttcttgatgccaagagccttcatagccggagtgattgccaggcagattgttgactttgatctggtcggatctgcaaccaccaggtttgctttaaacggatccagtccacgttctacgcattctacagaagcataaaaggacttcagatcaatacagataatagaagtctgatcctgactcacattgtcacctcccatacgtctttcctctttttgtaacatgtatcccattttgactgtcaatgactgtgcatccttcctgttttctttaaaatataggaaattcattccacatattcattgacaaaagaggaaatattgtgtatcttataggaaagatgtttcccttatctgtgattcacattataggagagatatttccctttgtcaagattaatttttattttttaggagacacatttcccgttttgccttgaagcggctaatgaaacttataagacaaggcttagaaagaggtatgtttatgacattcggtgaaaaagtaagatcattaagaaaagaaaaaaagatgagtcagcaggaactggccagcatggttggtgtttcatataggaccattcgatcctgggaagtagaaggacgtttcccaaaacaaaatgttctgtatcagaaactggcagatgcattacagtgtgatgtttcttatctcatgagtgagaatgaagcttttatcacagaggcatccgaacagtttggtaaccgcggtgccaaacaggctcagcagattctggaacaggctgcagctatgtttgctggtggatcactgacagacgaagataaaatagcttttatggatgagatccagagcctttatctggattccaaaagacgtgcaaagaaatttacaccgaaaaaatatctgaaaaaccaagaggaaaaataatagaaggcgggattattgtacacctaatctgttaccttatagttacaaggatatttctgccctttttattttttacttttgaggtgatttatttgagaaacacttacatatatacagaaacaaagaaattaatcaagaaatatggcaccagggatccccttgagatcatggatcagatgaacattgttgttggggaaacttcaagatataaaacactgaaaggctattgcttcatgagctgtaagacaatctatgtcatgatcagtagtttcctttcagaagaagaaaagatgatcgttgccgcccatgaattaggacatatcatcctgcatcgttcccagctgaaaatggctccaatgcaagatgatacactctataatatgacggataatacagaataccaggccaatctgtttgctgccgatcttctgattgatgatgaggagatcgaagatatggttcagaacgaagacctggattatttcggactctgcagttctctgaatgcaactccggaactcatgagctttaaactatacagcctgacaaaacgaggccaggcttatcatatgccgatggagattcagagtaatttcctggcaaaataataaaggataagcgcattctacaataagaaaactatagatttatctcactgaaaggaggaacatttatgtcaagacatcatatagaaaaggtaacttgtccttcctgccatcatgagggggattttgagctctgggacagtattaatactgcactggatcctgaaataaaagagcaggtacttaatcaatctattttcctttatacctgcccgagctgtggagagacctttcgtttaaactactccacactctatcaccagatggaagatcttgtcatgatttatctggttcctgaatcagaagtaaagaagacatatgaaatattttatgaaaaaaatgctttggctgattatcgtaccgaaaagtacttataccggattgtgacatcagcaaatcagctcgttgaaaagatccagatctttgatgcaggtaaagatgacagggtaatggaacttgttaaattacttgcgacagattctattctcaaaaatgatccctatatagaatttgatgaactgcgctttgctgtcgacgacgacggaacaaatattcttgtaatcattaataagggtgagattactggtgcagttgacattgacaatatgtatgaatttgcttcttcacactgcaatgatttcaaagatctccgcgatgatgaggatattgttatcaatcgggagtggattcttaacaaacttgccgaagcagaaaacgaatagtatatttggtggctacacccccaagcccctgtggaatcaataacgccggtactggatatcaaaatcccgcaccggcgttattgattgtaattatcttactttgataaaatgatagattgtcagctctgcaaactggaaattatatatgtctttgcaaatataccatatctattagctgtacaccgtcctcataaattagatggtcataattatcggtaaagaaattgggaatcttgtgagaacgaacaaatccacatttttcataaaatggtatcgtcaatggactgtcacctgttccaacttgcaaaacagaatattcatccgcatatttattggcaagaaaatcaattaatgctttgccatagcccttttcctgattttccggattgactgcgatattcttgatttcaagtattccattaccttcatcggtgacaacacattcagcttttacatcattgtcttcaagcacatacatagttcctttttcaagatagcaatcaaccatgctctcctgttcatcagctaataacaataatgatataaactgctttttatttttgttaacttctcgaattctcatacaacttgttactccatcaattgccatctagtttaattcatcaaattccgatttttcaatccgaataattttagtttgccgcttcccattttgcaatcgccgaacgggacacattcattttttctgcaagcatttcttgtgtaaacccatttgcacttcgcagttgttttattctttctcccattgtcatataatgcacctacttccccagaatttattttaccacgtattcttctgttcatctgtcacctgcatcgtatccgtatttaccagataaaaatctaccaattcggtctcgtaattaccgtctggatatactttttctaacaccagttcttcgcaagaattaccatccgcatccgtcttcgccccgttgtcatacagacaatattttacatttaccgtattaccatcttttgtttcctgcgtttcactgacaacaccatagatttctccttttgcattcgcagtgtaactgaatgccatattttgaagtgcattattctcctgaagataattatagaccgccagcatcgcattctgaatcgtcagaccatcatgctgtccttctgcctcataatcttctaccacatctccgttctgagtatcttctgtcactggggaatcctctgtatccgcatccgatgattcttcgttatcttcttcagcatccattatatccgaagaatccgaagaccaccacagaccatccatactctgcataataaatagattattggttcgatatctccgctcgccgccataatcctcctgcacggttatatacgtatatttgctgtcatgaccagtcaccgtctccgctccatccattccgaacactacactcagaccactcattccaataatcaaaagtgtaaatatcgcagcagctccaaaaatgattattaatgccactctgtttttaccaggctgtatggataatgcctggcaattgtgtctgtacaagcttacgattccccagattaaaagaatcgccagactgattgtaataacagcaatcgatatttctgcgaaacgatatctcacttcatatcccatatcacggtttataccataccacaatccgtaaaagaaggtactatatgcaagaatcaaagtaatgacactgatccgtaccggatgctctttcttatccggcactacctttttcagtgcttctaccatctgcactgtatctctctgctctatccattcagcaagctcagcttctggcggatatacacatttagtatccggaatccctgcataacgcatctggctctcttgaagcccttctgtatctcccgccactactgctgtaaccactttcatgtaataatacaccttcaactgtgccggattaaatttatctatacaaatatcttccagctcctgtgtagcccgttcataattgtcaagaagtatactcatccttgccataaccaaaagcatctgattcgccacagcagggtaacgttgatattgtttctcatataaatactgtgcatactcatgtcgttcttccggtgttaaccggtatgacttctttctactctgtgccagcatcgcgattcgcataccataagccacttctaaaatcgcaatcagctggcagataaatgcaccaaatccccagatatctgttgtacgatccacataggttaccaacacaatgcctagcattgccggaatcacgatcaaccattttgcccaatctgattttctcacactaacaccctcctgaatagtttttctgaatatagtatattaccgcacacaccaatcaaccatatacgcattttcaattaatatcatactgatccgcttgtcatccctcaaaacttgaatttatctatatccaatatctttctaccattgatttataaggttcatctatagcatcaatttttattgatgtaccatctaaaacaatcttttttaattttgttaaaccacttaaatctggtagttctgtaatatattttaaatcttgaagttttataatttctaaatttataagttcgctaataaaatcaatattatctaatttgcttattctccatagacctatctctttaagagattttaaatctttcaaatcatctaagtcattatttgaattccatagtaattcaagtttttctaattctaaacatttcataaaatcaaatgattttaattttattcctctaagagataaagactttaatgacttcatttctgacaaacattcaatattcttttttgcttttttacctaaccaaagtgtattcaacttatcatattgtaaaagccatttacaatcaaattttatagaacttcccatggtatctgccataattaataattcttctatatctttagataaatgatttataaaagagtaatctcttaaatcaaaggcattaagatataaactttttagatttaattttgtaaggacattaaaatctaagccattttcccaatcacgcaaatgacaatcaatacgcaaccttcttaaatgaggcatgttttctaaaaatgaaatatcacaacgattaagactggtaatagagaaaatacgaaaatctaattcaggttttttctctaatatagaatcaattttaataaacgcttcttttggtaatgctttagaaatttggattacttgaattttatcatttgaacaaatttcagaaataaatttatcatctatatctttatagctaaagcctcctactaaaactccttttctagtttcatcagaaatgttaataaaattatttcttatccaagctcccataatttcaccatccttacaaataccgatttgcacatcaaatcgttttcttcattctatcacaacttctattgatccgccatcagtctttcgaaccaggtatccatgacaatgataaactggcctgctcctggcaattcttgcagcatttcatcaagagttttctgtttcacatatttctgcacatacacccaacaggcaacgctactggcttctgatacaatgtcagctatggttttgcgcataagctcttcaaattcagcaatttcttcttttgggacaacatcatacagggttggtgcctgatgacttaattttactccattttcatttgcatctttaagcagattcttaactttttctcttgaattctccggtactttcatgtactcccacataaatgctaccacatcagatggtgtgtctttttttagtggtggtaactgaatataatctttgttttcgctcattttcatatcctcctcacgatataataaaatcaataatacgttctcttgtcatgtccagtacagtatctacgaacactcctgcaaaaaggatcagatacagaattacactcagcgaaaacagaaatgcaacctgtacccagtcatggtaacagtatgcagttgctataatcaacaaagtgaatataaaaccaaggattccccttacaaccacataagtctgtactgtcatcttcactgccaggccgatcacaaaaaggatcagccataccggcagtaataatatctttccagcaagttttaaaataaacatgtgcacctcctatcttaccagtcctggcatatcatggttcacctctgcctgataatatccgttcatcgttgacggtgcattaaacagggctgctaataaatatttcttgatgttcttcacctttgtggtgttaccactcatacagtgtaagacatactcgatatgtgaataggtcagcatcagaaattttttcttcaccagtgatgccggataccagttgctggcaatcaagatcttgtcatttttacacatcacagtctctacgatcaggttcacgatttcatctacctgtcgcatatcgtcatgatgggttacttccagtgattcataatcaatggtctctttgacaaggttttcataagcctgataatcctcagagcggttatcgctatcaaatcttttctcatccacagatatgatatgattagatttattatcattcatttcagtatcactaagattagtattattagggtttgaaatgtaaacttcttgaagtttgttttcgggacttctagaagtttgattttgggacttcatgaagtttaaattgtaaacttctgcaggctcttcattttccacagaagtttgttttttaaacttctctaatccctctccaaattttttctcatctgttttctcaggcataaaggttttcacgtagataacgttcacctttccaaatccctgcctgcgtttctcaatcagaccaattcctgtttcgtcatccagttctctcatggatttgatggctttatttctgccacagttcagtaattccatgatatcttcgatggaaaagtagatatatgctctgtttttgtcgtcaaaccactgatttttgatggaaagagacattcgatccaacatcagtccatataaaattttagcatcgcttgataaatctttaaaatagctgtctgtaaataatgcttttggtatgcggtagaagctgaactgatcagcttcggtaccgtaaaaataattaaatgtcatttttttctccataatttcctcctttcgttttctgctaagaagtcctctttttaaacttctttgactttgttttattagctttttctatccttaacaggactgttcctgcatccatttttctaataatgattcaatcacctgttccatatctttggctgtataatcatccggaaaatactttgtcagtttcttttctgagaaagtaagagaccgggatactttctttgccattacacaattattgaaaatcgataacatctggatctgattgattggtccatcattcagctgatttctaagtgctgcaatctgttttggtttgataaatcctgtgtcgcagatatattcgtagatccatccctgtacttccttatcaatgtaagagatgtctacagcaaccgtgaactgaagctttttgttatctaccagttcaagaagttccggtatcaattctgtcagacggatgtaacgctgaatctgtttagaactttctccaacttgctctgctaatacatccctagatacagttcctattaaattctggtcattttggccagaattactttttggtcttcctgcttgtcttttcatagctgctaatttcattttataagcaaaggctttctcactcggcaacagttcctctcgctgaatgttagcgtccaccatagccacaatggcatcatcatctgataattctcttacgattgccggaattgtcgtcagtcctgccagctgtgctgcatgcattcttctgtgaccggataccatttcatattcttcattttcatccatgcgaagcagtaccggtgtcagcactccattgatctttacactttctaccagatcctgcatcttttcatcatccagcaccttgaacggatgatttttaaacggatggatcttactgatctctatctccattgcagattcttcatttaccacacccagcagttcatcaatacttgccagtttgatcttttcgccacttctatttttcattcttcaaaacctcctgtgttaagttcatatatgcttcagcaacctttcctttcggacagtgcatgtagatactttttccctctgcactggtctcagcagcttttacggacatcgggattacattttcaaatacttcaatctggcttccgtaggttgtatgtactcttgatgcaatgtcccttgcataattggttctgaaatctaccatagtcaggagaataccctcaatcgccagtttccggttcagtcttttctttactgtaagaatagtcttgatcagctgttgaagtcctttaacaggcagatatgcagcctgtactggtatcagaactgagtcagaagaaaccaatgcattgattgtcatcataccaagactcggcatacagtcgatcagtatataatcgtatcgggatcttatcgcatcgatatattctttcatgatcatttctctgctcataacatttcccatcgttacttccaatgcggaaagctcaatatttgccgggagaagatctacattttcctggtgatgtaggataccatcttccaaggagatttcttcttcattgatgacatccatcatgatcgttgccagtgtgattcgaagatcatccggctcctcatatccaagacttgctgttaaacttccctgtggatccgcgtcaatcagcaacactttcttaccttctcttgccagtccaatgcctacatttacggttgtggtggtctttccaacgccgcctttctggtttactacggatataactttacacatgatttcttcctcctttaactttcccatgattcttttttccataatttcaacagtgccagtatttcccgcttcatcattgccggtgtataggaattcggaaaatacttatgtagctgttcgtttgtgaaagccactcttgtgatttcaccctttttaacctcacacataatttcttccatcttttccagtgacaactgcttttctttactcagttgccggatcctctgggcctgtgagagtgacgggattgcctgtgcatactccattgctacaagcagttccttttgctctttttcacttaatgcagctatctctacagccggacaaaaagaaatgatctcatcatccagtttctgcaacatttccggtatcagttttgtcagtgagatataacgctgcacttgttttggactatcaccacaatcttcactgatgatttctattgcccgctttcttggtgttttgtggtcaacttggctcttttttcgaccactttttctttttaatacgtcattcttcagtttgtaagcaaaagctttttcactgtagctgatccgttctctgtgaagattggaatctaccatgcttaaaatggaatcatcttcacttaatactcggatgatcaccggtactttacgatatcccagtttctccgcagcatgttttcttctgtgaccggatatgatctcatagtatccatccggtaccggtctgacgatcagcggatttaatattccatacttctcaatgctttcctgcagaagaaacatttccttatcatcttttacctgaaacgggtgctctttgaacggacgaagacgctcaatctcaatttctatgattctttcttcgttttctcctgattgtctgtttggctcagtcatcttgactcctttcctccaggattcatgaaataaaaaatgcctgcctggaacttttatagatagtaaagttccaaacagacattgctgtttgaccattagctgtagctaatagaattgaatactgtttaagctaattcatgtttgcaggtttgggagagattgtttcttttcccgccttttctctgatttacatccccgaataaggggtgataacggagcggaacccaaatgttagctggacttcttaaaacccatgtttgcaaaacggtaattttgattagctgtcagctaacaaaaatcggattgcgttagctggaaattgattattttgaatggaattttgtgtcacgaacgtgatttgaaaataacaaaagcgttcgttgtcagctaatccagctaacattttcgaacgctttgaagcccgtcgccaagaggatttgaacctccgacccctcgcttaggaggcgagtgctctatccagctgagctatgacgacacatgccgcaaacccttgattttactgggtttctgggatttttcccttcggccatatataagattatcaactctttttcgagttgtcaatctacagatttttttgatttggtaacattagaacgttccccaatttggggaatgctttgttgtcaccattagcatttttcagaatagattcgaactgaaagttgtttttcattttttccctttggggaatgcctcggctttctcttaggaggacctcgttatatccatttaactaagggaacagggtgcctttttttggcttaaacacggggtttttgccatatggtttcggtgccatatttatgattttcagtcgatcgagtcgaactgttaaccatccaatgtgtaattaagtgtcagtacttacgatacctttttgggaaacaggttgctgtcaatactaactgtctggattcaaatcggactcctttttacaatttcagaaaatcgtaagggaaaggggttactctttccttaggaggacctcgttatatccatttaactaagggaacaattgcatctgtattccaaacacagttaatatcttatcatagaacctacaaattctcaaccgtttttcatctatttggaaatgaaccgtgttgatggaagtacgaggttactgttcactccagtgtcaatcactccgctgattgacagagaaacttgatgcaatcgggatatcgtctgaacaggtagacaagaatcaagtagttgttaagcatgttaaaatagatgggaaacactgtagatgtatgatgagacgggacgatagttatattgttgccgtaacagtggaggattctgtttatttacagggaactcttttagcaatactgatagtgggcacttatctggtattggcgacatgctggatgatgtatatgctctcgaaagttataaaagagagagtagagaaggagaaactgctttatacgtctaatacggatgaattaacgaaatgttttaacagacatgcttatgaaaaggatataaatgatcttgagcttaatgcagaatggctttatatttctatggatcttaatggattgaagcatgcgaatgattcgtatggacatgcggcaggagatgagttgatatgcgcagcggctgattgtatgaaaaacagctttagtgaatacggaaaggtttatcgaatcggtggggatgagtttgttgttattacaaagaatatagggcgattcgaagaagtattaaagaactttgaacgtagtgtagaagaatggcacggtaaatatatagattcaatgactgtatcatatggatatgtattcagttcagaaaagaaatggaacagcgtgtatgatattgcgaaagctgcagacaaaagaatgtatgagagcaaagctaatttttatcgtgaaaaagaaagggatagaagaaaataaagccggtgcaggattcatttcctgtatcggctttactgctcctatcaagactctctatgtttctcaatataatacggaacgcaggttgtgaagaagtcaagtagcgtatctgcataagaagtatcatcttttggaatcgcatgaagtacctgttgaatcgcgaatccatcaagtgtagccataaagatagaagcgaattgttctgcaagcttacgatcatcaagtgcaaatgcagaagcaaaaagcgtagcagcctgatccaggatcgacttcaatccggaggtatatttctgggaaaattctgaatcacatttcattgcatctgataatagaagtaagtatagcttttcttcctgaaggcgtttgaaacgaatccgagcttctttttctacattagaaaagagagaatctacggtgattttttcgttctcattttcatgaaaaatacgatgtgcaaaatgaatcgaatcagtgacaatctcatcaaataaatcctgtttattcttatagtaataataaatcgcgccggttgtcatattggcttcagcagcaatcgaacgcatacttgtcttatcaattccgaacttttcaatctgtcggattgcagcttgtttgatctgtgttttggttgtgtttttttgttcattcatgttctttacacctcgaaatgaatttgtgttattactcacaaaatctgcatcatccgtgtctcttggcagtgtggttgacacgggagtgaacagtaacatgattatagcataaaaaaagataaatgtaacatcgatatttgtttgacaaagcacataacaaatgttatgttggttttataggaaattattataatttatgaaaagatttatgaaaaaggagagggaatatgacagacaaatttaaaggctggtatccggactatattgagaacgaaaaagaacgtgaaccaatcttaaaacttgccaagatgatgacagggcgtgcaaagaaaaagctcggattagagaagatgacaaagtacgatccggagtattggggactggcacttttgtgtacggatgagcaggctgagatcgcattgaagatgggggtgcgccagccgaaaactttagatcagatggtgaaggtgacaggcaaggacagaggttatctggagaagcagttagaggaaatggcagaggttgcgctggtggagtataactgggaaaatccacagcatgagaagcagtatgtactgccaatcttcgtgcctggaagtgcagagttctcttgtatgaatgcgaagatgttagagaagcatccggagcttggaattttctttgagagaatgagtcgtattgcattagaaggacttgcaccatttatgcctgagggcggtgttggaatgcatgttattccggtagagaaggcaatttcaacagagaatcagtctctgccgatcgagcacatttcacattggcttgaaaagtatgagggaaaatatgcagcgagtccatgttcttgtagaagatctcgtaaaacattcgataagggatgtgcggatgatccggaagaatggtgtattgcggtgggcgatatggcagattatatcgttgagacaaataaaggtggacactatattacaaaggaacgtgcgttagagattctgaaacaggcagaggacaatggtttcgtacatcagattacaaatattgacggtgagaataagattttcgccatctgtaactgtaatgtaaatgtctgttatgcgcttcgtacttcacagttatttaatacaccgaatatggacagatctgcatatgttgcaaaagttgagacagagaactgtgtggcttgcggacgttgtgtagagtactgcccggcaggtgctgttaagcttggtcagaagctttgtaagaaggatggttctcaggtagagtatccgaagcatgttcttcctacagagaagaaatggggaccggagatgtgggacgaagactatcgtgataagaaccgcatcaactgttatgatacaggtacagctccgtgtaagacagcctgtccggcacatatcgctgttcagggttatatcaagatggcagcgcagggaagatacagagatgcccttgcactgatcaagaagaacaacccactcccggcagtctgcggacatatctgtaaccgtcgctgtgaggacgcatgtacacgtggaacaatcgatcaggcaattgcaatcgatgaagttaagaagtttattgcagctcaggatctgaatgctgagacacgttttattccggagaaagtagttccggcaacaaaaggatatttcgatgagaagattgcgatcatcggtggtggaccggcaggtttatcctgtgcattctatcttgctgaaaaaggatataagccgactattttcgagaaaaatgagcgtgccggcggtatgctcgtatacggaatcccatcattcaaattagagaaggatgtcgtacaggcagaaatcgatattatcaaagagatgggggtagagatcaagactggtgtagaagttggaaaagacatcacattagatgaacttcgtgcacagggatacaaagcattttacattgcaatcggatgtcaggggggacgtcttccgggaatcccgaatgatacagcaaagggatgtgcatctgcagttgatctcttaaaagaggtgaatgcaaatgaaaaatacgacatcaagggtgacgtagttgtcatcggtggtggtaacgtagcgatcgacgtagcaagagactctaagagatgtgtaagtgacgatacaaaggtaaatatgttctgtctggagtccagagagacaatgccggcttccgtagaagagatagaagaagctgagtcagaaggaatcgttgtaaatccgggctggggaccgaaggaagttctcgtagacgagaatggtgaggtccgcggtgttgtattaaagaaatgtctttctgtatttgatgcagaaggaagattcaatccgacatatgatgagagtgagcttatgacagtagaatgtaagcatgtattcttctctgttggtcagtcaatcgtatggggtgatctgttaaagggaagtaaggtagaacttggacgcggcaatggagcagttgcagacgagcttacttaccagacagcagaaccggatatttttgttggtggagacgtttatacaggaccgaagtttgcaatcgatgcgatcacagcaggaaagcagggagcaatctcaattcatcgttttgtacagccacagtccagtcttacaatcggacgtaacagaaatgatttcatcgaattagataagaatgacatcaaggtggagaattatgataattccagccgtcagattccaggacataatgatgcaattgatacaaaacattccttccgtgatgcaaagcttttatttacagaagagcaggtgaaagcggagacagcgcgctgtcttggatgtggagcatctgttgttgatccgaataaatgtatcggctgcggactttgtacaacaaaatgtgagtttgatgcaatcaagttacatagagaacttccggaatgtagcagaatggttccttacgaggatcgtctgaaatttgttcttccgaacatggtaaaacagtccatcaaactaaaatttaagaagaaataaatttgaaagaaattaaagtaactgttcagagccaacctccaaaatgctacgcatttcgtcggtgtggcgtatccgccaaataaaatttcaaaaacagtcttaaaaatgcaaacattttacacctgttttatgaaattttgcttggctctgaacagttacaaattaaaatctaaggaaaattttaaaaggaaacaagggggaaaagtaaatgggaatactttataatgtacctgatttaaaaacctggggaattatgttctttatcctcgtagttctgatcgcactgaatgaattaggacgtgaaacaaaatggggtggaatcttactgtttgtgattgttccggttgtgctgacaatctttgtatggccgacaacctgtgcgccgggaaatgagtacggaaccggaaactggttcaactgggcaaagacttactctgcacttgcaggttgtgttggtttcatgctgatgcgttatattccgaatgcgacaaagcataaatgggtaatctgcttcccgccactgattcttgcaatcaatatttgtgaggcagttttccgtgatttcgaggcatacagcttccatgcatttgcaggcgagaaggtaaacaatctctgggttatgtcaggaccgtggaatatcatgaatggaattgcaggtattttaaacatcctgctgatctgcgggtggacaggtatttacatttccaaagaaaagagtaaagatatgatgtggccggatatggactggatctatatccttggatatgatctttggaactttgcatatacatataactgtatttcagaccattctgtatactgtggtgtgattctgctgttatcctgtactatccctgcattctttatcaagaaaggatgctggttacagcatagagcacacacactggcactttggattatgtttatcatgacagttccacagtttgcagacagactggcgcctgttccgacaacacataatccgaaggcattctttgctgtaagctttctttctttagttgtgaatgcggcagcagttatttaccagttcagcgtaatccgcaagaataagttgaatccgtttaaggatgagatttatacagacaaagcattttacaagaaaataaatgcagagaataaataaattgataataaaaagtccaaacaaggattttttgcggccaaaaacagaaagtatttatcaaaataaaaatatcctgaacaagttgcagagccagaaagccttgtaactgtcaggatatttttgtttggtgctgtcagctttaaaaaacgttatttaccgacagccccttctttatgtgagatacataacttactggaaaatgtcttaaaaaatcaagaaaaacatttaatatatgatatatttgcagattttggctacttttcatctggatttggcaagaaatgcaccttcttttcgcctataatgcaattgtaaacgaaaaggaggtgtttagagatgatgaagagaattaaaagatggctgcatgagatttatgaagaagatatcaagttcttcggacagatgaacggaatgtattttcgataagcactagaaaaagaaaataaaagaaaaaaggagaaagaaaattatgagaaaattagcaaaatggtttgaagaagcacttgaaagttatgtacaattaatgggtaatacttacggatggggcggaagattgtaagtcatggaatatacagaaaaatcaaatcaaataaacaataaaaaataagggtagatgtcttgagagaagatatctactcttattttttatatatagcaattcttcacaaatgtgattctatccgtaaatgattgttttattttcttaaaaagtatatacttgtttcatatatattttacgctattttgagaaaggagcaccttttaaatggactctatattatacgaaaactatctgaatatcctaagacaggaactggtacctgctcttggatgtacagaaccgatcgcaattgcctatacagcggcaaaagcacgtcagattcttggagaatttccagattctgtagaaatggaacttagtggaaatattatcaagaatgttaagggcgttacagttccgaattccggaggaatgaaaggaatggaagtggcagcagttcttggtatcgtagggggaaatgcggataaggcactggaagtgttgagtgaagtgacttgtgaagatattgcgaaaacgaaagaactgatcaatcagaaaatctgttcctgttctttagttgaaggagttgataacctctatattacagctaaagtaagaaaaggagagcattttgcttctgtaacaatcgaacatcagcatacgaatattacaagaattgaaaaggatggtgaagtgctgttggataatccttataaatcagaggttaagactaccgtagataaatcaaaacttacggttaaagatatccttgattttgcggatcaggttcgtatggaagatgtgcagccgatcattgatcgacagattaaactgaattctgcgattgctcaggaaggacttgataataactatggagcgcagattggtaaaacactgatgcatgtatggggaaaaagtgttactacgagagcctgtgcaagggcagcagccggaagtgatgcgcgtatgggcggatgttctatgccggttgttatcaattcgggaagtggtaatcaaggtatgacggtgtcgcttccggttattgtgtttgcagatgaatgggaagtatctcatgagaagctttgccgttctcttgttgtcagcaatctgattgcgatccatcagaaatattatattggaagtctttcggcgtactgtggtgcagtcagtgctgcctgtggcgccggtgcaggtattacctatatgtatggtggaacctatcaacaggtttccctgacaatcatcaatacacttggaaatatcggaggaatcgtttgcgatggagcgaaaccttcctgcgcagcgaagatagcgacatctgttgatgctgcacttatggcttttcagcttagtattcagaacaaaagtttcctgccgggagaaggtatcatcaaagatgatattgaagaaacaattaagagcatgggatatattggaagagttggtatgcgtactacagatacagagattctgaatgtaatgatagaccgtgcagacatcaatgaggagtgctaaacatgaataattttatctatgaaacaccaacaaaagtatactttggaaaagacgaggaattaaaggtcggtaagattattgcagaatttcatccaaagaaagttctggtacatttcggtggaaattcagcaagaaagagtggactgcttgataaggtggagaattgtctgagggaagaaaacatcagttttgtagagcttggcggagtagttgcgaatccggaacttccgcttgtaagagaagggattgagcttggaaaaaaagaaggtgtagattttgttcttgcagtaggtggaggttctgttctggactcatctaaggcgattgcgaatggactggcgaatccggaagtggatgtctgggattttcattgtggtaaagctgttccacagaagacgctttcgaagggagcgattctgacattggcggcagcaggttcagagatgagttcttcctgtgtaatcagtaatccggaaacaggagagaaacgaggatgtaacggactctttaaccgtatgaactttgcaattgagaatccggttcttacttatacagtaagtccttatcagacagcatgcggtgcagtagatattgcaatgcatacgattgaaagatatttctgtccgggggaggatacctatctgacagattcgattgcagaggctgtgatcaagagtgtacggaaagctgcaggagattgtctgaagaatccggaagattatgctgcacgagcaaatatgatgtgggcatcttcacttgcacataatggactcacacagtgtggaagagagttccagctcgttgttcatcagttagagcatgaagtatccggaatgtacccggaagtagcgcatggagcaggacttgcagcgctgtggtgcagttgggcaagatatgtttataaagcaaatataaatcgctggctgcagtatgcatctaatgtatgggggatggatattgattttgaacatccggagaagacaattgaaactgcaattgatatgcaggagcagtattatgcatcaatcggaatgccgatcggattaaaagaacttggtgtaaaagaagatgatcttgcgaaactggcacttgattgttcaagaaacaaaacgcgttcattgatcggatataaaccgttggcatatgaggatattctagtaatttatcagatggcatatgagagaggttaatatcgaaagagctgcttaatgcggctgctttcgatactctcttggtgacatatggtatcgttcctggaatacgcggttgaatgttctctgactgtcgaatcctgcccggatgcagatgtcgagaatcgtatggtcgctgtgaagcaggagattacaggcgtaatccaaccttgcttcattcagataccgattaaaattagtatgaaatgtgccggagaagacacgtgataaagaggactgactgattccaaggtcatgagccattttggaaagcgtcagttcttctgtataatgtgcagcaatataagaaacagtctggtagataatgtcattacttcccacactgctcttatctatcatttcaaataagggaagagtgcgtgcaagtataatctgaataaatgcctgatgcagaacatgcccttgtgaagcggctggatagaccagcatgcttcgcagggcataatttacgtctgggtgtacttcttgagccagaattaccggatttacaggacaaaattgttgcaattctttcgtatagcttggagcaagaagcggtgaagcaagtgcatagatcgccttactggattcgctgctgaatacctgatagtggtggatcaattccggaaatacaagtgcaaaatcgcctttttccatatgatacaattcagttccgactccgatttccagtgtaccttctgtcacggatacaagttccattgatttgtgaagatgtgggggaatatggcaggaaatctgttcagcgatttccagtgtttcttcattttcttcgtaaatcggtttcattttttcctgcctccgggttaattgtttagaatagttgatctaatagtatcatcatgcgtgtatatgacatgcttcacaggcagatggtgttgttgcgcatccgcttagtgctgtctcacgcagttcaaccggaagtcgctttccgactttgtacattgcttcgagcatttcatcaaaaggaatgagctgagaaatgccggcaagggacatttcagctgcaatcagtgcattggcaaccccggctgcattacggttctggcaagggtattctaccagacctccgaccggatcacagacgagtccaagcatgttcataaggactgttgaggcggcatccagacattgcttaggagttccacccataagttcaacagcggcagacgctgccatagccgatgcaacaccgacctcagcctgacaccctccgacagcaccggcaacagtggcatttcgcatggcgaggtaaccgacagcgcccgcattgaagagaacctgctgaatctttttgtcggagaaatggtatacttcctgaaaagcgagaagcaatcccggaacgatgcctgcggaaccggcggtaggtgaagcaacgatcagtcccatggacgcatttgtctcaagggttgccatagcataagtgatagcttcctcaagcagttcaccgcatagtccctgaccactggcagaatgatgggcaagtttttgtgcctctccgccgatcagcccgcccatggaacggattggtttttcaatcggagagcgggcagcttctttcatgatttcaagaacacgcgccattttttgatccacttctttagcaggacattctccggttatgatctctcgattacgcataacttcagagatagaaatattctgttcctcacatagtgtaaggagttcgtttgcatttttaaaatccatataaaaaacctccttgaacacaatcacatctgtacgaccataacatccagaacatgttcgttctggcggatggtgtcggcaatttcttccggaagttttccgtcggattctacaatcgtgtaagcagtgtgtcctttcgattcacgaaacagacgcataaaagcaatattgacccggcggtcgctgagacagctggtgatccaggcaacaacacccggaacatccttctggacaacaatgatagcactgtattcaccggtgaaatctacttctacatgattgatctgtgtgatgtggactttaccgccgccaagagattctccacggatcgtcatctcctgaccggcagtattggtcataataatatcgacggtattcggatgaatatcagtttcttcctcattcggagtaaaagagtatttcagtccgttttctgtagcaatctcgaaggaattccggattcgcatatcatcagtggaaaatcccatgattcctccaagaagtgcgcggtcagtaccgtgtccgtgataggttctggcgaaagagccgtagagaataaattctacttttgcaagcggtccgttgatcatcttctgtgcaagataagcaatgcgtgccgcaccggcagtgtgagaactggaaggaccgatcatattcggccccataacatcaaaaacgctgataaaagacattttaaatagcctcctgagtttgtatatatgagtttagtatagcaagtgcggcggtggatgtaaactatgagaaacacgatccgcgtaaatgctgttaggggcagttactgcaaacagtaactgcccctaagtatgatacttatgcgaattagttctgatcaagtacggactggatctgcttcatcagctgatcgtagtttgactgatcatcgatgccacccatgaaaggttccccaacgatatttccgtctttatctacaagaactgttgtagggaatgccatgatgtttccggcatattttccaactgttgaattggaatcaaatgtcaggtttttgtaagaagcgccctgtgctttcagaatttcttttgcttctttgattccagcctcattgttgtctaaagtgtcagtgttgatacctacaacttcaccgcccatttctttgagcttctcatttaattcatttagcttagagagttctccaacgcatggcttgcatccactgaaccagaagtttacaactgtaactttgtttttagcgaaaagactgtcgtctacatcatttccattcagatcttttcctttgaaacctttgaatacacctgtggactcatctgatttagaggaagcgttgtcggaggattcggatgcagcgctctctttctcgagttttgcaatctcttcttcgataccgcgaattgtttcaatgtctttgctcaaagtttcatattcttcttcagagaaagagtctttattagattcaactgtacttgcaagaacgtcagcatagttttcgttcttggtatcaccggcagtgttcttgttcataagaccaaaggctttgtcccatgcatctttgtgatcagcgaaaagctggttttcctgctggtaaaggtcgtccagttttttgttcagctcgtcattgctgcccgtttctgttgtggaagaagattcctgttttgtattggttgttgaggaagaatttccgcagcctgtaaatgcaaaaagtacagaaatggcaagtgatgcagcgattaccttttttaatttcattgcgtttgttctaagtgttttgtttttcatgattttaaatctcctttaaattacattttgtttgttttagtttatttattgtcagcctttttcttgtttgaaaacccataatgatagcagattgcgtcagtcggacaggctttcatacattctccgcagcggatacactccggatggtttggcgtgtctactacgttgacatccatcttgcagacacggctgcatttctggcagccaacacatttctcatgatcaacctggatcttaagaaaagataccttgttaaacagtgagtaaatagcgcccagcgggcagatccatttacaaaatggacggtaaaacaagatgctcaggatgatgaaaagcgcaaggatcgtgaatttaaatgtaaataaatgtccaagcgcggaacggattcctgagttggcaagtgccagtgggattgcgccttcaagtactccctgcgggcaaatgtatttacagaagaaaggatctcccataccaagtgaattggttacaaatgccggaagcagtataacaaagacaaccagaatcacatatttcagataccgcagaggcttcagctttgcggtggaaaatttcttgcccggaatcttatgcagcagatcctggaaccatccaaatggacagagaaatccgcagataaatcgtcctaacagaacacctaacaggatgaaaaatcctgtgatgtagtaagtgaacttaaatttggaggatcctactacagcctgaaatgctccgatcggacaggcgcctgtggcggcaggacaagagtaacagtttagtcccgggacgcacatcgtctttacatttccctgataaattttccctttaaacagattcgggatatgaatgttggtcagcagcgttgcagctgcctgaatccatccgcggaagcggaccagaggctttttgcttgatttcattttcttatccaattccgacacactccatacataattttattgccttgctaagcacaaccgcagcttctccgcggaagattccgacaaggaaaaataccagaccagctgcaagtaaaagaatctgtgttgctttttcagatttcattaaaatactcctttcaatattcaaagtcggtttattgacctttcgatgtttgcattatacaatagggggtgtaaaatttctgttaagaaaatggagaaaaataaattgagattattagttgttgaagatgagaagaaattatgtgatatgattgcgaaaagtctgcatcaggcaggttatgaggtagacacgtgtaatgacggagaggaagcactggatatgatttatgcggaaatgtatgatctgatcgtgctggatcttaaccttccggggatggatggaatggatattcttcgggagcttcgcaaggaaaatgaagagacaaaagtattgatcttatctgcgagaagtcagattgcagataaggttgacggtcttgatgcgggggcgaatgattatatggaaaaaccatttcatctgcaagagctggaagcccgtgtgcgaagcctgacaagaagaaagtttgtacagaaaaatgtctgtcttgaatgtggcagtcttcgttttgatacaaaagaaaggactgcatatgcaaaagacaagccggtcgcattgacaagaaaagagaatggaattctggagtatcttcttttgaatcagggaagaccggtcagtcaggaagagttgatcgagcatgtttgggattcttctgtagatagtttcagcggttcgatccgagtgcatatgtcttctctgagaaagaaactgaaagcaggacttggttatgatcccatcgtgaataagattggtgaggggtataagataggagatggaaaagcatgagaaaaatatcactccagtggagactgacgattcttacaaccatgctgatcacagtattgtgtggatgtctgacatttttcttatataagaatggtgtctattatatcgatacgcttcaggagactgtcacagatcagggcactacgccggaggcagtctacattgatattccggataatgagtgggatgatttcgcatcacaattttctacggaagtatacaattcaaagtcagattatagaaatagaagtttgttgatcactggtgttgtagcgctgattggcggagcggtaacttattttgtcagtggccgcgcattgaaaccactcagagaattctcagaaacagtagaaaaggttcaggcgcagaatctgacagagtatacgattgaggaaaataaaatcgcagagttggaccgacttcgtacatcttataataagatgctcctgcgactttcggaatcattcgagacacagcgtcagtttacagggaatgcagcacatgaactccgaacccctttagcattaatacaggcacaactagatctctatcatgcggcggagaattcagagaacgaagcagctgcacaagagacgatccagatggtaacagagcaaaatgaacgccttagcaagcttgtcagaacgcttttagatatgagtgagctgcagacggtagcacgtaatgaaaagattgaaatgcaggggctgatagaggaggtgctggcagatttggaaccgctggcacaggaaaagaatattgaactgatacagaagacacagaattcatcggatggaagaacagatggaacagaagagtcgttgctggtcgcatgtagtgtgaacagtaacgaaaagccagaggatgaactgatattgacaggaagtgatattctgatttatcggatgatttataatctcgttgaaaatgcaattaaatataatcgggtagatggaaccgttacagtatcggcgaagagagagaagaatgaagttgtcctgacagttgcggatactgggaatggaattgatgaggcatttcgagagcagatttttgaaccatttttccgggtagataagtcaagaagccgtgagcttggcggtgtgggacttggacttgcgttagtgcgtgaaattgtgcgggtgcatgatgggaagattgaggttcgcggaaatgagcagggcggaacgacatttgaagtgagaatggggatgggatggaatagaagaataaaataggtaattgcgaaacaagttcgcaatctcgataaaaaatgcggtaagaatcctgcatcgcaggattcttaagatgaaaagtaggtgtttctaaatttggacatgatcaaaagacttcccagataaactgcgaagaaaagatcgtatggatctgaaagcaacgagaagagtgactatcgcaggagtcctgatgaacataagcctattggatcacatcatcataggtgcggatggaagatagtgctgaatttatcatcactctgattcgtataagtaatattttggtcaccgtctaacatgaaaaaatatgccttttcatcatatcctttaaggtttaacattgaatctaatttcgcattgtcatacacagctccaatttcatactaaatacacactccgtttctaactcaagtccatccattgcctgttgaaatccaagcctaataccgtctaaaccaacgaataaatcattcgtggcatgagtaatcctcattcgttttggttccactaaactatgagatgggggagccccctttttcaaggaaactaattttgtgactatttcacaattgaaatgtaaacgttttcccgtatgataaatgtatagaattcttccggaggaattttaaatatggaaaatatagacattaaatttatcgcgaaaaaaagcgagtgttcgattgctacggtttctcgtgtgatcaatcgttccaaaccagtcagcgaggagttacagaaaagagtaatagatacgatcagaaagtacaattataatccaagcatttacgcgcagaatttggcgggtaaaaagtcaagactacttggttttataatgacaaactacatcaatcaatatcagctgctactgtttcgttatctgaatgagtttgcatgcaagatggggtatggttgtattattcgttattgtaattctggatttgaggaaaaactagaggtattaagagaactggaaatcaggggaatcgaagtctgctttagcctttttctgctttcgcaggaagaggaagcgtacataaaagaacatttcagaattaaagtctgccatatgcagtcaccggaaatgcgattgaacatcatagaaaaaaacgaaagttctgtttatgaggctgtgtgctatcttgctcagcttggtcacaaacgaattggaggcattttttgtattgacgaaatagatgatagtttcctcatggcaaggaaaagaggctttttaaaagctataagtcagataaatctcgatcaagatgaatctctgatcggccagcttcatggagaatgtgaaaaagacagtgtgatttctgtgatagaaaagatatttgtacctcaaaagccgccaacggcattgttttgttatagcgatgaagttgcgatcgaggtaatgtcctggatcatgaagcagggttatagaattccagaggatatatctgtgctttcatttgacggtattccgtttgcgggacgcgtaacgccatctttgtctacaattagccagccagtagaatatcaggcaaaatgtattataaacggcatgttgtatctacaggatggaatagaaagaccatgcgatgaaaagggaaatgaatatcttctgcagattcgggacagtgtggggtttcctagtcattaaaaagattggaggaaaaatatgaaagcgaaaaaattaattgctactggtattgcaacatcaatgttactgctggcgcttaccggatgcggagcaggtggaaatagtggtaaatccgcaaaagatacagataaaggatcagtatattttctgaactttaaatctgaactttcttctgaatgggaagaagtagccggaacctttactaaggaaaccggaattgatatgaaagtagttactgcgggaagcggaacctatgaacagacattaaaatctgagctttccaaaaaagaaatgccgacactttttaacgttaacggtccgattggatatcagacatggaaagactattgtgctgatctgaaagattcaaaactttatgaatggcttactgacaaagatatggcaattaccgatggcgatggtgtgtatggtattccgtatgcagtagaaggatatggaatcatctataatgatgctattatgaagaaatattttgcgcttccggataaagcagttgatatttcagatacaaaagagattaaaaatttcgacacgcttaaaacagtggtggaagatatgacaaaacataaagatgatcttggaattcagggagttttcggttcaacttcatttgctcccggcgaagattggcgttggcagactcatcttatgaatatccctgtgtactatgaatacgaggctgacggagtggataatctggatgagatcaaattcacatataataaaaactttaaaaatatttttgatctctatctgaataattcatgtacagaaccgtctatggttggatctaaaaatgtcgaggaatccatggcagaatttgcaactggaaatgtagctatgatccaaaacggaaactggggctgggcaatgatctatgacctggatggaaacgtggtaaaaaaggaagatattaagttccttccaatctatacaggagtagaaggcgaagaaaaacagggactttgtgtcggaacagaaaactatatctgtatcaacagtaaggtttctgaagctgaccagaaagcatctgagaagttcttggaatggctgtttaacagcgagagtggaaaagcttactgcaatggaatccttggaatgatcccgccattctccacctttggtgaggatgaaagacccgataatccgctcgtacaggatatgcttagttatatgaacgatgattctttatattctattccttgggacttttcaaccttcccgagccaggaatttaaaaaccagcttggaagctatctccttgaatatgcgcaaggaaatatgacatgggatgatgtagttaagcagacaactgattgctgggcatcagaaaaagctctgcttgcacaatagtagagtttataggctggcgttttccgaacggaaaatgccgcatgatacagtgaatgtagcagatttcgctgctttggaatgcaaagcagcggtaaaatccgttgctgtttgtgcaatgcgtgaaaagcaacaaaatttatggggcagagacaaaaatgtttctgccctatgtacgaaaagggaggctgtatagaagatggaaaaagcttttaaaaagagatttgtgatattaatgttaccaacgctgatcgcatttattattgcatttattattccatttgtactgggaatttatctttcattcactaaatttacaacagttacagatgcccagtggattgggctgagcaattatattgtggcattccgggataaagatttccttgcatctctcctgtttactgttaaatttgtacttgttaatcttgtgacgattaacttaattgcctttatgctggcatatgtgttgtccaaaaagctccgtggaacaaatattttccgaacagttatatttatgccgaaccttctgggcggaattgtgcttggttatatctggcagctaattattaatggatttctttcttttttcaaaacaacgcttactgcagatgcggcatatggattctggggaatggtgcttgctatgaactggcagatgatcggatatatgatggttatttacattgcagctatccagaatatttcagaggaagtaaaagaagcagcacttattgatggtgtaacgcgaggacagatgattagaaagattattctgcctctgatcatgcctgcaattacaatctgcttatttatgacaacaacaaatgcatttaaaatgtttgacttaaaccttgctctgaccgcgggacttccgggaaaatcgacttctctggttgcactggatatctataattcattctacaacagaatgggttatgagggagtcggacaggccaaagcagtgatgtttttactgattgttgctacaatttcagtgacgcagcttattattactcggcgtaaggaggttgaaaactaatgaaaaataagaagagtaaaatcatactgatcttaattcttactgtaatctcggttttatttatcgctccgattgtgattgtatttatgaattcgtttaagagcaaactgtttattaacagtacgccgtttgcgtttcctaatgccgactcttttgtaggtttggcgaattatggagaaggaatgatcaagaccggatttttgcaggcattttttattactttatttataactgtagcctctgtgttttttattgttgtcctgacttcaatgacagcatggtatttggtacgtgtaaaaagtcgttttactaaagtaatgtactatctgtttgcttttgctatgatcgtaccattccagatggtaatgtttacgcttgttaaagtatcaaatatgtttcatttggacaatctgattggtatcatatttatttatgtcggatttggtgctggattgtctgtatttatgtttaccggtttcattaaatcaattccagtttctctggaagaggcagcgatgattgatggatgttctattatgcaaatttactttaaaattgtgtttcctgtgatacgcccgatcattatgacagtcgcaattctgaatgccatgtggatctggaacgattatctgcttccatatcttgtaattggttctgaatataaaacaatttctgtggcaatccaatatctcagaggtggatatggatcaattgaccttggacttatgatgtccatgctagtactggcaatcataccaattgtaattttctatatgatctgccagaaatggatcatacagggagtaatcgccggagcagtgaaaggataaggagactagaatgaaaaaagtattatatgaggaattacttccggaagaatgcgtgcagagaatacaggagatgccggttgcttatctcccgcttggcacattggaatggcatggtccacatatgcctcttggggctgacggaatccagtcaaaagagttgtttgtccgagtggcagaaaaagtaggcggcgtagtacttccgatgttgtttatgggacctgatcgtgtgttttatgacagggggactgcgttttatggaatggatattaataccgaaggcgcactgaatacatattgcgtccagcagatgaaaggcagtgcctattggatggaaaaaggtcagtttcaggacaatctgcgcagtatctttgcccaactgtccagagcaggtatacgtatcgtagtcggacatggacatggtccatcaacaaatgcatttcaggaactaaaggaagaagcagcagaaaaatatggcctgcgcattttgactgcttggacatttgcagatgatgatcggttgaaatatcagaatgaccatgccggagcgaatgaaacatctatcgtaatggctgtacgtccggagttggtagactttggacaggtgaaagaaaatgaaagtaatctgatcggaatcgcaggacgtcatccagtcagagaatcatccgtagcatacggaaatgaaatccttgagtatacaatgaaaacacttatttcaggtattgaaaaggagtacaaaatactcaaagaaagctagatgcaaatgagtttgaactgttttatgaaaaaagaatcctgctcgcaggattcttttttcagcatttgttgatttttttacaaattcaattttcttctcgtagcaaagctacgatatctgagtcattatccattgccgatttgtcggtaatttctgttttctccaattcttcaactgaaatttgagattcagtaatattgtctattattttcaaatgaaacacttcttttttctctgcagcctacacgtacattctattgtgtttgtcaacccttaaaaaatggttagaccacttattgaaaatctaaccatttaagatacgcaatgctaatcaaatgacattgggctctgaacagttacgcataaaaaaggctgcgcacctatagttcaatattattgtttcatcatccgattccgcccagtactgcgccggcaatcagtgcaataagtgcgagtggaacaaggacatattttccaagtagcaagaaccaagttccgatttttttctcacgtccagtatttacagctttcagtgcgaattctttatctgcgatccagaagaacatgatcgctgcaagcattgctccaagtgggcagatatagatagaaactgcgtccatccatccggagacgatgccctggatgagaagtgcgatacagcagccgaatgctgcaatgattccaacagctgagacacgctttaatccgaaacgttcctgtaatgtagcaaccggagcttcgtatagatttacaagtgaactcattccggcaaaaagtacgcagatgtagaaaatgatgcctacaatcttgccgccgggcattccgttgaatacattgaccagatagataaacatcagtcccgggccgccagaagataattcagcaccgccgactgccattcccggaatgatcacgaaagcagcgagtaaggcagcgattgtatcgaagatggcaacattttttgcagaacttaccaggtcttcagaatcctttaagtaggaaccataaataacagttccatttccggcaatggacagagagaagaatgcctgcccaaaagcatagatccaaagtcttgggtctaaaagtccctttggattgatcgtgaagatgtaacgatatccggtcgatgaaccaggaagggagaaaatatataccccgagtccaagaaacagtacgaacaataacggcatcattacgccgttggcacgctcaattccaccggcaatccccattgccatgatcacagcagttacaaggactgcaattacaagccaaaggttattaccaaaagcagaagcagtactgtcgaacatgcctccaatttgattcatatcttgtttcatgccggcaatctgtccggtcagtgcaaggaaggtatacttgaaaatccatccgacaacaactgtgtatccgattgcaagtgcaagggagccgagaaccggaagcagtccgatcaattcacctgttttcttattgccggttcgcatttctgtacagacaccgaaggctttgattggtccacctttggcggcgcgtccgagtgccatctcttcgatcactccggtagaagcaatcaatattacaaataaaatataaggaatcagaaaagtcataccaccccagtctgataccatgtaaggaaatcgccagatattccccataccgacggcagagccgatgcaggcaaggataaatcctgtccggcttttgaatccgtcacgttctttctcatgttttcccatgtgtagtcctcctgtaaaagtgcgtatacttttgtacacgaacgtattgatgtattatagcatatttacataaagaaaagaagcaccgagatgatgcttcttttggtgtgtgcgcctagcggtgcacattacgaatcatgcaatatgacagaaagaagagtccatccctttctcaagcaatccactttcagtaattgttttataaatagcatctgcaagtgctgcatgaccggattcatccagatgctcacggtcaatttcacttggaagagcaatttttgaagcgtccagaaaaccggcgtgataatgagtggcaactttccgatattcctgtgcaagctgtctggaaacctgttcagacgcaagatcgaattcaggatcaaagccgtcatctccgactccattgccaagatggatcggagagatgatcaagagttcaaagggctgagaactatagttctttgccttttcaataacctgaatcaatcctttggcaatcgttttggaagaagcgttaaagcgcgttttacagtcatttgttcctaacatgagaaccagaagatctataggattgtgagtctctattgtgattccaatctggtctaatccgcggcggccttcgcgaaaagcgtccgaaaaaatagttgtgcggccgcacaatccttcttcgataatgcgatgtccgttgccgaaattcttttgaagcaggcaggtccatcttgttttttcatcaaagcgtccggttccatccgggcggtatccgtaagtattcgaatctccaaagcataagatattcataagcaaattcctcactcaaacaaaataacatattaaacaagtatgaaaagtatgataaagcatttcaatgagaaagtcaatagaaaaacccaataaacatatgaaaatagtaggaaaatagaagacaataggggaatgctcgggttattggcatattcatgccaaaacacctcgcgggatagtggtgtgtgaacagtaactattgttcagtagtgagatgtcacaggcaggaagtaagcattgtttttgagaaaataattttgtataatgaagtgcaaagctggttacgataagagatagcagtaagaatgttgaggcattcttgaatatacgacttgggaagtgaaagacaaactatgaaatgtaaatggataaagaagttaacagcaggaattatatttcttgcggcagttggaagtctgagtggctgtcagaaagcagcgacatcggagaatctgttccgcgatattgaggttaatatgacatcagtagaatcggcagaagagaatcagatcgtaaaactgcagatgggtgatggcgacagtgcaatcagccaggagagcaatctggatatcgagatgacacggaatccggcatcagtacacagaaaaggtcagcagaagacgaatatggccggaacgaaagagacacaggagatggaatcttatcaggtggaagaagacgggaagactgtgatctacagtggaacggatgaagcctgggagaagaacgctgttgaggagaaagagacatcttcacagcagactgtattgttcaatggacttcagaatctgtccggagcattcagcgtttcacaggatcttgcgaccgtgaataaggaagagtgttttgagctgacaggaacgatcagtggaacacagttccaggagacatttgcagatacgctgaaagctttactcggagaagattcctctgatctgtcaggctggaatctacaggcttccgaggatgaggaaaacaacgaggagcttcagcagaaattgaacaacgtaaaagtggactgtgtgattgatatttatagaaataatatacttccggcaaagattacctttgatctgacagattatttgaaggcagcaggagaagagaatgcacaggtgacatcctatacactggaagtgacatttgtgtcctataatgatacaaagaagattaaagtgccaaaggctgtaaaggaatctgcgaaggataacggtgaggacgaagcggagaatagtacagatgaaatgctggaagaagagaatcaggaagcaacggcagaagcagaagccgctaagggaatccagtcggatatagaaggtgccgcaccacaaagtgaagaacttggagcaagctggaattcttataccgttcagattaacggtaaggtactgacacttccgtgtacgattgcagacctggaaagcactggacttacgctggatgaaaaaagccttccgcaggagtatgagattgaagcaggagattatcagaatgcatggttcaaggatgcttcgaagaatacgattatggtggatttgatcaatacagggaatgatgtgaaagaagcgaaggattgtctggtcggaggaatctatgtggaacagtattcactgagaaacgaagacctgacagtaatattcccgggaggaatccaattaggaacggcaattgatgtcgttcaggcagcatatggagaagcatcccaacatacagaatctgagcttgtaaatgtatataactggtatgaagacggaagtttttataatagttgcgagatcgatacgaacagcacggatggaacagtgagcatgatgggaatcagcaggttcgaagtgaaaaatggtgagtaactgttacattcttgaactgtgatgaaaaaataaaagaaaatttgtaaaaacacttgcattccacaaaaacatatggtattatataaaacggtcacgcaagaaagtgatcgttgaggccccgtggtcaagcggttaagacatcgccctttcacggcggtaacacgggttcgattcccgtcggggtcattttacagaaagcattgctggatgtaataaaatttaagatatggcgcagtagccaagcggtaaggcgtgggtctgcaacaccctgattcaccggttcaaatccggtctgcgcctcttagaaagtttggaaatgattgtttccggacttttttctttatgtgaaaataagtatttagatacgacaaaatcccccatgagaagaagtaaagattctgtcttcccatggggaattttacgtgcaatattatagggcttatcagttaataaacaaaacttatgaattcgcaagtgctgtctgttttacatctggaattgcaatcaaaatcggataaagtacagcagaaaggatcagtccaccgattccctggaccaggttcgccggaacgcttgcgaatgcaccggctccgtagataaagtactcgcacaggcagtaaccgccggcaacgagaatgatatcagcaacaccgccgaggatgactgctgtgtaacggcttttggaattcttacctactttacggtaaagaagggcggagcaaagggataccagtcctttgatcacgaatgtgatcggaacatagacaaaatatcctccgagcaggtctgccatagcagatccgataccgcctgcgaggaatccccatgcaggtccgagaacaacaccagcaaggataacaatcgcatcacccgggtgaatatatccgcttgttccgggagtaggaatcttgattgacatcgtagcaacacaggcaagcgctgcgaacagtgcagccatgacaagtttctttaatgttactgttgacttagaattcataacaaaaacctctttcctttaagatttatcatactatacaacagaagtggactataaaaaagagccacttttacaaaaataaaccataccagtttgagcgggagacaaatttataaaatcttaagaaatgtagagagtatgctttaagatgttgatgaaataataaaaaaggtttacactagaaatgtttgtatctgtatggtaactttatagatactttgaaagaaagtatagtttacaacatatgaaaaaggagaacttcaaagatgggatatcactcaattatatatatattcctatttcttccggtttgtctgttggcctatcagcttgcaccggagaaatggagaggaagagtcttgcttgcattcagctggattttcttttatctgctaagtggaaaattgctggtttatcttttggggacaacgcttctgacccattgtattggcatctggctgactttgctcaaaacagaagaagcaaaagccgtggaaggtatggatcggaaacaaaagaaagtaattaaagcagagtatcagaaaaagggaagaagagtattaatactgggaatcttgattttactcggagttcttggttatttaaaatattttgatttctttacgacaaacttgagttatttattcggacatccggttttggaaggatggagaccggaaaagctattaatgccaattggaatttcattttatacattgcaggcaattggttatatgacagatgtgtactggggaaccatccaggcagagacagaaatctggagaaccgcattgtttctcggattcttcccacagatcatggagggaccaatcgcaagatattcagatgtggcagatactttgtatacaggaaagccattggaatatagaaatgtggtcgatggttatgtaagaatcttctggggactctttaaaaagatggtgatagcagaccgtatggcactgatggtaaatcaggtgtttgaccattatgcagactatcatggagcagtgattcttgcggcagcgatcggttatgtgattcagctttatatggaattctccggttgtatggatatcattataggaagtggaaagctgtttggtatctgccttccggaaaacttccgacagccgttctgtgcgaagaatccttcggaattctggcgcagatggcatattacactcggcgcgtggttcaaggcatatattttctatccggtatcggtatccggattggttaagaaatggaaccagtatggaagaaagcattgcggaaagcatattacaagactggtgacttctgcaatcgccctgttcccagtgtgggttgcgaacggagtctggcatggcgcacagtggaactatattttctatggaatgtattattttgtattgatcatgcttgggattgctgtggagccggttcgagaccatattttagaagcgtgtcatattgatccggagacgaaaatctggagaacaatccagattgcaaagacatgggtgattattgtagttggagagttatttttccgtgcaaatggattgaaggccggatggtatatgttctgtagtatgataaagaattttgatgtgggacaattaacggatgggacactgtatacacttggacttgagcgggcagattatctggcagtaattgtaggttgtctgatcgtgggagtgataggttctatgaaagagcgcggaatctctgtacagaagaaaatgggagaactggctgtaccggtgcgctggggattgtattatgccttagttatagggattttgatcttcgcagcgtatggggatggatatcagattcaggatctgatctatgctggtttctgaggtgagaagaatgagtaagataaaaagaggaattctctttattgtaatactggcagtatttttggtgacaagttctgtcgggatggaatattatgtggtgcatcagctgaatggagaagtgaccggaagaaaccgcccatttgcggctcttacagttgagccggaagatacattggatctgctggtggccggtgacagcgaaagctataattccgtatcaacaatgcgattgtgggacgataaagggattacaacttatgactgtggacagggagcacagagaattccagagacttattacatgctgaaacatgcatttaagaaacagtctccaaagattgtgatacttgagacaaatacattgttccgtgatattggagcagtaaaaagtacacaggagatattaacgcaggcaggacagtattatctgccggttttccgttatcataatctgtggaagacagtagtagatgagccggaaatgcatacgaattacaaggggtttgtgatcagggatgaggttgatccatatgaaggaaaaccggattatatgaagaaaaagaaaaaatgtgaaacaatgcctgagtatgtaaaggtttatctggagaaaattgaagaactgtgtgaaaagaataatgtgcagttattgcttgtaagtatgccatcaccaaagaactggaatcataaacggcatgcagagatacagaaatatgcggatggaaaaggaatcacatatctggatctgaataagaaggtggaagaattagggctgaactggacagaagatacacaggataagggcgatcatctgaatgtttatggggcagagaaggtgacttcgtatcttggaaattatttagaagagaattatgaactggaagatcatagaaatgatccgacgtatgaagtatggaatcagctggccgaacagtataagcagaaccttgcaagaatacaaggaaaaatagaagtggcaaaagaaacgggtgtaggaaaatgatagcaaaagaagagttgaatattttgtggagcctggagcagacagcggaaaagtatgaagacagggttgctgtttcggatgtaaatcaggagctgacttggaaaggacttgtgaagaaagctcaggtgataggtgcagaattaagtaaaaaagttcaaccgggaaatccgattccggttcttttagagaaaagttcagaaacactggcagtgatgcttggaatcgtttatgcaggatgtttttatgttccggtgaatccgatgaacccggcggaacgtctgcgaaagattatggagaagctggagccggaagtgatcatttctgatgagaagggaaaagagcagctggcagcagtcggaataggactcgaagagaaagtgatcggaccggagacacttctaccgacaacaggaacggatttgtcagaagaacagcgcagtaaacttgaacagatccagggacaatggaaagagacagatgctttgtatggaattttcacttctggatctacaggaactccgaaggcgattgtagtaagtcatggtgctgttagccggtttgtccgtcattttacagaaatctttgagattacatcagaagatgtgattggaaatcaggcaccatttgattttgacgtgtctgtgaaagatatttattccagcatcatgacaggggcacagcttgttttgataccgaaagaatacttctcgacaccgccgagacttctggattatctttgcgataagaaagtgacaaatctgacctgggctgtttctgcattgacacttgtgtctgcgttgaaaggattgaattacagagtgccagaatcagtgaaaagagttatgttcagcggagaagcaatgccgccaaaacagctgcgtatctggcaggaaaagctgccggatgcaaaatttgtaaacttatatggaccaactgagattacttgtaactgtacctattttccgattgagcgacagtatgaggacagtgagaaaataccggctggtaaggcattcccgggaagaagagtaatccttgtagacgaggaaggcaaacaggtgaaagaacctggtgtacagggggaaatctgctcggcaggagaatctctggcgaatggctattataaagaacctaagcagacagcggagaagtttgtgctgtatcctgtagatggaacagaacagagaatgtatcgaaccggagatcttggaagttatgacgaagaaggaaatatcgtatttgcaggaagaaaagatttccagatcaaacatatgggacaccggattgagctggaggaaattgagcgttctatgacagcacttgatggagtggagaagagctgctgtgtctttgatatggagaaaaatcgtattatgggattttatcttggagagaaagcagcctcagatgtcagaaaacagatgaaggaacaacttccggtctatatggttccgacaaaattgattcaggtagatgaaatgccgttgaacaagaatggcaagacagaccgtaattattttaagaattatggaaaaaataaaggctgtacattggggtttgagaggagcagcataagaaaggagaaaatattgtgaaaaaagaaatgctgtttaatgctgcaaaaaaatatggaactccgctttacgtgtttgatctggatatcttaaaagaacaaacagatcgtatccgtgcaggctttggtccggggatcagcctttgttatgcgatgaaggcgaatccatttctgacaggatatatggctcagtgggcagaccgcatcgaagtctgctccatgggagaattccggatctgccggagactgcaggtaccattggaaaaattatttatttcaggtgttatgaaaaaacgggatgatatccgggagatactttcatattgcggaaataaatgtgcatatacagtggaatctccactgcatttccaatattttgcagaatggagcgaggaacatccggaggatggtgtgctccggttatacccgcggcttacgagtggaaatcagtttggaatggacgaagatacggtattagaaattctgaaaaaggcaaaggaacttccaggaatcgaggctgaaggaattcactatttctcaggaacacaaaagaagaatctgaagcgccatcagaaggaactggcatatctggatgaatttttaaagaaagcggcagaagagcagatcgatgtgagatgtctggaatacggctctggaacggcagttccgtatttccgcgataaaacggcagagacctttgaagaagctggattaaagggacttcaggacgctgtgaagggcatgcagtggaagggacatgtaacagtagagctgggacgcgcgctggcggcgatgtgtggctactatttgaccaaagtggaagatacaaagacaagtgatggaattcattattgtattgttgatggaggctgtcatcagctcaattatgacgggcaaatcaagggaatgtatgaaccgtatgtgaaggtacttccaaaggaagtttcagtgaaggttgcggaagtttccgaaaataagaatacagaagaaaagacctggaaagtctgtggatccttatgtacactgaatgatgttctctgcaatgaaatcaccctgaaaggtttggaaaaaggcgccatccttgtattcgagagaaccggtgcgtattcagcaatggaaggaatggcattgttcttgagccatgaacttcctggggttgtactttacagcgaggaagagggatggatccaggcaagagtacagcaggaaacatacaaattgaacatggtagaatagttacagattcaaaatgataggaaaagaggaagaaaaaatggaagaattattagagattttaaatgagattgatgatagtattgactatgagaacgagacagctctgatcgatgatcagcttcttgattctttcgcgatcatcacacttgtatcagagctggaggatgcatttgatatcagcattgaagcctctgagatgatgccggtgaacttcaattcagcaaaggcaatctgggcaatggtacagagacttcaggaagattaagatttcaaaagtctgtcaatgattcgggaggcttcgcttcttgtcagcgtagctgcatcccagtcaggtatcagttctttctgttccgtcagacgttctaagagtgcaatctgctttggtgtggcaggctgcacttttttaattttatattgaagttggagaggctggaacactttcggatcctgtggttcaaaatagtgtgccagtgtctgataaagctttgcggttgcgagtgcatcatagtatgcgcggtgagcagcaggattctcaatatggtaatagtcgcataacgcaccgagacttttagactcaaagtctttatgtactttgcgggcaatttttaaagtatcgatccccattttttcaaatgtaagaccttctctgactgcactgcattttacaaagctatagtcaaacatgacgttgtgtccgatcagcacgtcatcttcacaaaaggagagaaaatcgtggatgacttccgggcaggatcttgctcctgcaaccatatcatttgtgatatgtgtgatgttggtgatcatcggtgtgatcggtttgtctggatggacgaattccataaaacggtcaacgacctttccttcccggactttgagggcaccaatctctataatttcatgttcctgaggacttagcccggttgtctccaggtcaaatgcaatatatgatttcagcatagaatgctccttatctgtaatgttaataacttaatatcactatactaacattacagataagagaaagcaaattttataaaaatgattctaattctcgtatcatttcttcttctgttttgataatttttcttgccagcgcatcggcagatttgtcagccctgttcaatgtattggcacgttctccgagtgttttaattcccatgctgcatccatcaatcagaagttttgcaattttggagttatcatcattcagattcagtttaagttctgtgctgaaccaggaaaatgcggaagccatcattcccggagttttaacttcatttcccgaatcaatcaggtggtcttttgcattaccgcctaatcgagaatgacgatcaatgtatttttcaattaattggaataaggttgtatcttgggtgaaatctttgatttgctgcatactttcgattgccatctgacatcctgtgttgcattcttcatatagttttcgtgtttgttcatccatgatgaaatcctcctttttatggtgtgttatttgttacgaaataatatcaaagatggaatacgtgcatcagttataagaaaagaatgtgggtttctttatatagaatgtggataaaatacaaaattatacggtattttgtgaaaaacataacggtaaaggacttttctaagaatatttgttgtgctaaactaaaaaaagagtttaacagaaaggaaaaatgtactcatgttaaagggaaaaactgtacttcttggagtgacaggaagtattgcagcatataaaattgcgtcacttgcaagtgcgctgaagaaattgcatgcagatgtgcatgtgcttatgacagaaaatgcgacaaattttattaatccgatcacatttgagacactgacaggaaataagtgtcttgtagatacatttgaccggaattttcaatatagtgtagaacacgtatcattagcgaagaaagcggacgtagttatgttggcaccggcaagtgcgaatgtgattgggaagattgctcatggcattgcggatgacatgctgacaacaacaatcatggcgtgcaaatgtaagaagatcgttgctcctgcaatgaatacgaatatgtttgagaatccaatcgttcaggataacctgaaggtactggagcattataattatgaagtgatcagcccggcggttggttatcttgcctgtggagatacaggagcagggaaaatgccggaaccggagcttttgcttgaatatattttgcgggaaatcgcaagagaaaaggatatgaaaggactgcatgttctggttacagcaggtcctacacaggagtccgttgatcctgtacgctatattacgaatcattctaccggaaagatggggtatgcgattgcaaaggtatgtatgcagcgtggagcggatgttacacttgtcacaggaccgacctctattgagaagccacattttgtaaatgttgttccaatcacaacggcgagagaaatgtttgaagaagtgacaggacgggccgaagaacaggatattattattaaggcagcagcagttgcggattatagaccacgctatgtcagtgatgaaaaggtgaagaaaaaggatgacgatctggcacttgaaatggaacgcacagatgatattcttgcgtatcttggagcgcataaaacaaaagatcaatttctctgtggattttcgatggaaacagaaaatatgctcgagaattccagaaagaagctgaagaaaaagaacctggacatgattatagcaaacagtttgaaaatggaaggcgccgggtttggcgggaatacgaatgtggtcacagtgatcacagaagattttgaaaaagagctcggcaagctgacaaaagaggaaacagcagatcgaatccttgatcagattctggcacagagaggggaagtttaaaagatgatactgacaatagacattggaaatacaaatattgtattgggctgtattgatggagataaaactctttttgtagaacgtttgtcaactgttcgtacgaagacagagttagagtatgcaatcgatattaagaatgtacttgatatttatcatattcatagagatgaaatcgaaggcggaatcatttcttctgttgtgccgcagattacaaccatcgtgaagctggcggtagagaagatcctgaagaagaatgttcttgttgtgggagcaggaattaagacaggattgaatatccgaattgataacccggcacagttgggaagtgatctggtggtcgattctgtcgcagcaattgcggagtatccggcgccgcttctgatctttgatcttgggacagcaaatacagtctgcgtgattgataaaaataagaattatatcggaggtatgatttatcctggaatcggagtttctttggattctctgacagctcatgcatctcagcttggcggaatcagtattgaagcaccggagcatatgattggaaagaatactacagagtgtatgaagagtggtctgatctacagtagcgctgccgcaatggatggaattattgatcgtctgcaggagcagcttggcggagaggcaactgtgatcgcgacaggcggactggcgaagaagattgttcctcattgtagaagagagattatcctggacgatgatctgcttctgaaaggacttgcaattatttacaaaaagaaccgtaagtaaaagatgacgcaaataaaaatgtaaatcaaatttgagtataaactgaaaaaccggaaagtaaaagaatttaaatttatcttttactttccggtttttatgtatatgtattaacgacacatatttatgggaaaattattttcctataagattctgtaaaaaatgattttaaacttacagtttgtcaccacgcttgatatatcccggtttatcaggagatgcgataatacgttttccacggattaaacgagcatgtttgtcgattacgagattctcagcgtgaacgccttttccgataacaacgtctgcaccgacgacacaattcttaagaacggcaccttctttgattgtacatccacgtccgataacacagttctcaacagttccttcgatcagacatccgttggaaacaacagaggatgtaaccttgctgccttcgaaatactgtgtcgggcaagagtcatttgtacgtgtataaatcggccagttatcatggaacagatctgttgctttcttcagatcgatcagatccaggtttgcctcataatagctgttgaagtctgagattgttgcaaagtatccacgatgtggatatgcgcgaacatcaagttccttacaagactcattcacgatatcagccagtgtgtacatggaggaaagtttgtgtgccttctgaaccaggtcaaggaacaggtctttcttcattacataagtatccatgaagatgtttctgttcttagcatttccaaggtttggctccatggagagaacacccttctgcttgttgatgttcaatgtctgacagttcgggaaatgatctttcgcattgtcaacagaatgatacatcagagtgatgtcagcaccggagtcaatatgtgttttgaggaacgcactgtaatcagctgtgtaaaccatgtagctaggcgcgattacaacatactcagagttgatctcatcaaagcagtcaaggttttccatgtaagctgcaatatctgtgttgtaaataccgttatcaatgttgctctcctgaaagagagtagccagtttaccacgtttggagttgatattgtaatggcgtcctgttccgatgtgttctacgagagaacgaggttttctacgaacataaacctgcattacatcaattccactgttactcatattagaaatcgggaagtcgattacacgatatcttccaaggaaagagaaggctccgattggacggtatgcctgcatgtcatttacctgtacgttggttcctgcgaagttgataattccaaaagctttactcatcttattcgtccccctttactcgttttgcaacgagctcaatattttcgctggcagcgtctccgacaacagcgttctttccaatcttaatgccatcggcaacaagggcgcgtgtaacaacggcaccttctgcaacctcagcacccggcatgaggacactatcaatgacttttgcaccggcggcaactttcgcaccagtgaacagtacagaattcttaacttccccatcaattacacatccctgtgtgatgaaggctctttctacaactgcatcagctccgacatattgtggaagtgctgttgcatcttctgtataaatcttccagcttgggtcattcagatcaagcttattgttcttatcaagaaggtccatattagcttcccagagggaatcaattgttccaacatctttccaatatccattaaacttgtatgcatacagatttttgccatcattcagcatagtaggaataatgtccttaccaaaatcatggttagaatctgcgttcttcatatctgcaagaagcatcttgcgaagaagcttccagttgaagatataaatacccatggaagcgaggttgctctttggatgttcaggcttttcttcaaattcaacgatatgtcctgtttcatctgtattcataataccaaaacggcttgcttccttcataggaacttcgataacggcaatcgttgcatctgcattgttctgcttgtgatattcaagcatcttgtcataattcatcttatagatgtggtctccagagaggatcagcagatagtctggggaatatgtatctataaagtcaatattctgggaaatagcatcagcggttcctctgtatacatcaaggttcgcatcagctttctcacgtggtgggagtacataaactccactgtcctttgcatcaagtccccatcttcttcctgctgcagcatagctgttcagaagtacggattcgtactgtgtcagaacacctacaacgtcaatgccgctgtttgcgcagttactaagtgggaaatcaataatgcggtattttccgccatatgaaacggctggtttagccactttttttgtcaaatcatggaggcgggttcctcgacctccggctaagatcatagccaacatattatcgtgtttcataaaaagccctctctttcataatactacttctttagtatactcttttttgtgcgatattgctaggattttgcatagaaaaaataaaaaaatagcaaaaataatggaaaaatttatcgaaaatcatttgtcatttttcacaaaaaaagaaaataaggaaaatcagacagatttttaggcattattatatacaagtgaaaaggaacattaaaaaaattcctttaatatagaaagaattgattgatttcaaagcaggagtgtggcaaaatacaaatcacagtattcatgaaaatggcaggtgtgagatgaaagcaaatgtgaaatcagttttaatgaaaaaatattgcagagtatatcaggcgggggcgaagcttttgatggctgcacttccgtggcgttcaccgaaaatgctcagtggatcaggagcagtgaagaagctgccagaggcggttcgagatagaggatttcataaagtattaattgtaacaggaccgaagatccgtgcgaggggacttcttaatgaactgctggaagagatgaaagagaagaagttgaaatatgttatctttgacggcatttctcagaatcctacggatgaagaagttgaaaatggagtaggaatatttcttggagaaaagtgtgactgcatgatcgcatttggtggcggaagtgtgatggattgtgcaaaagggatcggagccagagttgcgagaccgaagaaagcagttcggaacttacagggacttttccgtgtgctacgtccgattcctgtaatcttcgccgtgcctacaacttcaggcagcgggtctgaggcaacgattgcagcggtgatcaccgaggttcagacacatcataaagcatcaatcaatgatttgcaattgatgccacgctttgcagtacttgatccgtgccttacagtaggactgccaccacaggtaacagcacagacaggaatggatgcgctgtgtcatgcagtggaagcatacacgaatgatacatataacagtgattttgagcgtctgatgtgtagtaaggcagtgcgattgattcatgaaagtcttctgacagcatatgaagacgggacaaatctgcaagcgagaaaggatatgcaggaggctgcatttcatgcgggacgcgcatttacaagaggaagtgtgggttatgttcatgcaattggccatgcgctcagcgggctctatggagtgcctcacgggcttgtgatggcaattctgcttccgcatgtgatgcgtgcctatggatcttctgtgtatgataagcttgcggatttgtgtgatatctgtgcgatggaagtagatacaccggacggtatgatctcagccgaagttcgtgccgaaacatttctccagtggatggaagagttaaaagagaaacttggaattccgaaatatccggatatgatccgggaagaagacgtgaaccagattgtaaaatgggcacagaaagaggcgaatccggtttatccggttccggagatctgggatgcgcaggagatgaaagagtttgttttggccatgatggaaggtgcgagacttgaaggtgcagaaaagaatgaataaccgacaaaaatcggtgagggatgtaatgaattggaggaaataatgacagtatgagtgacaatgcaacaatgaaaaacacaacgattcatgatatgacgaccggaagtccggcccgcctgatcatgcagtttatgataccgatgtttttgggaaatatatttcagcagttttacaacattgctgattcaattatagcaggacagtttcttggtgtaagagcactggctgcaattggaagtacaggatctctgatgttctttgtgacaggctggctgaatggtctgagtagtggatttgctattttggtgtcacagtggtttggtgcgaaagaatatgagaggatgcggcattatgtggcgatgtctatttacctttctgctggctgggctgtgcttatgacgattggtcttggaattgcaaatgagccaattttacgtttgatgaattataaggatagcattatgccggacgtaaaggcatatatgggaattatttatgcgggtctgattgtaacggcagcgtataatgcgctggctgcatttctgcgtgcactgggtgattcgaaatccccattgtattttttgattatttcagcagtaatcaatgtaggacttgatgtggcgttcattatttatggcggcatgggtgtagaaggatgtgcctatgcgaccgttatcgcacagggaatctcagcagtactttgctttatatatatcgtgaagaagttccctattctgcatcttaaaaaagagaatttcagattttctcttccagcttgcggaaaattgatggctcttggagttccgatggcattacagttttctattacagcaatcggaacaatcattgtacagggtgctgtaaatgtttacggggaagattatatggctggcttctccgcggcagcaaagattcagaatgtaatctgcacagtattcgtggccttcggtgcaacgattgcaacttatgtgggacagaactggggagccggaaaagtagaccgtgtacgacaaggtgtgcgctgtacacagattatgattctggcttacagcgtaattgcgatgatactggtatttttctttagtaaatatctgacatacctttttatcagcccatcagagacgaaagttattgaagtatcagtgctgtatttccatacagtattctggtgttatccattcctgggaagtatcttcctatataggaataccctgcaaggacttggatatggacttgtgccgatgctcggaggagtgtttgaacttgcggcgagatctgcaattgtagttcttgtggcaggaaaagcaagctttgcaggagtgtgtctgtcagacccggcagcatggatctccgcattgattccactgatcccgtattatatctatgtgacacgtaagtggaagaaacaagggaagatagcgatgtaaaagtgaaagcaaaaaacaggcgcagggaatcaattatgaagccctgcgcctgtcgcttgttaagttaaaattattctgcggcttcttcttcctcttcatctgaagtaagatcagaagcttttacgtgtacttctgtgatagtaactactgttgcatcaagatctgtcataagatcaacatctttgtctttggcaattggaagatcagcaacacgaattgtgtccccgattttcagaggtccaacatcaacttcgactttctctaccaatgcggcaggaagagccttgaaggaaatctcctgaagcatctgctgtggtactcctgaagacagtttctcgaggtttacaaggtgaatctctgctacagagtgaaccttctcagtgcttaccagtgcctgaaaatctatttcatctacatatcccttcaaaggattgtaatcaacttccttgatcagagcgtcataagtctcaccggcaacttccagcataacctggccacctttgttttcgactttcagaagtttttctatttcacctttatcaaatttcagtggaatagaatcttccagttcacgaccaaacaggtttcctgttacaaatccttcgcgtcttaatttttttgctttgattgacatgtctcttttttcagcttttaaagtattcatttatcttttcctccaaattactgaattcgcttagcagccttcaacttgtcaaaataataagtaggttttgttaagtgttctttttctttgctacagttacactatagcacccggtgtcaaggggaaggaaaaagcagggagaattgtagggtgaaaaattaaggttttgaaggtttaaaaaggtgtgataaatgaaaaaattaaggttgtataacgggaatattcagagaattgttgtgaaaatggcggaaatgaatgtttcggaaggatgcttcagaagaaaaatgacgaaattaaaaaggaatcaaaacatgtgtaacattattgaaaatgcaaatcctttatgataaaatttcaaacagaaactactgatattagtcgaaatatcggtatagaaatggggaagaaacaatatggatttacagacattgatcgttttgatcatcgagttgatcggaacgatcgcattttcaatttcgggggcaatggttggtatccggcgaaagatggatattttcggtgtgttggtgcttggtgtggtgaccgcagtaggaggcggaatgatgcgtgatgtgattttggggaagacaccgagcgcatttgtgaagccgatttatgtagaagtggcagtgatttctgcattagcgccatttctcttactttctattaataagagactgttgcatagcaaataccaggcactctatgcaggactaatgttcctgatggattcggtcggacttgggatttttacagcagtcggagtatccacaggatggacagcaggatatcatgataatatgtttttcttaagtttccttggagtgctgaccggtgttggaggaggacttctacgagatgtgatggcaggggttccaccatatatttttgtaaagcatgtgtatgcctgtgcatcgatcgcgggggcaatctgttgtgtactggcatatagaagctggggacagattccggcgcttgtgatcggaacagtagttgtgcttgtgattcgtatcggagcagcgcattacagatggaatctgccgtgcgtgaagctggaggatgaagaataacgaataggaaaattcaatttggtgacaagacactgatagaagtagtggtatagtgtaataatttagagacacccgttattttatcttgagaaggatgaaaatagcgggtgtttttatagtcttatttataaaaacagttcattttcttttcgtccggaacaagctttttttaacttctgggaagcagcagccagcattagtggattcagcttgcgggaatgcgttggacagacgctgatacagcgcatacaggaaatacatttgtccttatcagtctgcttaggattgtcagatggaattgctcctgacgggcatttcgctgcgcacaatccacaggaaccacagatatgtgaagcaccagggataagcggaatcgtaccgtattcgcggtaaggcctgttacccggaacatgtactggtggaaaatcagtttttagagtgttgtttgttttctcttttatcttctgtgcaaaggaagcgagttctgtaagatcattctgatcaggtcttccagttgcaaactgatgcatgatggaatgttctgcgacagccgcaatagctgcctggcaggtgaagtccttttcaatcagagtatcttcaagttcgattaatgtatcttcataagcacggtttccgtaaacggtgattagaatcgcagttgcattatttccgctcagggctttgattctctctaatgcaatggcaggaacacgtccaccgaaggaaggaactccgatgatacagagatcttcttcggaaaaatcatttgttagatcagaagtcttttcgcataaatcaatgctctgatattcgccaaattgttcagctataaatgtaactattttttcagttcccccggttggactgaagtaaattgcgtatatactcataaattttctcccttaattaaatgttttggcagatacaataattttagaggttttagagttattttgcaagtgcctggttgatattaaaagataaaagtgatatgattcaaatagataaaatattatctaaaaatgcataaaatagttaaaaatagataaaatattatccatagagtgaggtggatgaatgcaacagttagtatgggaaacagcagaagaactggatcaaaagcttgcgcaaagagtgcgtaatattagaaagagacgttcgatttcacaggaaaaattagcatctatgagtggtgtgagttatggttcgattaaaaggtttgagacgacaggaatgatttcattactttccttaacgaagattgcgatggcattggatatggcagatgaacttagagatatttttacaagtgtgccgtatagagatatccaagaagttataaatgagacgaggtctcaaagcaaaagaagagatagatttagatgagagtttatggaattatattaaagagagtaggagtttattatgagttacatcacaacatacacaggaaatcattttgatccgatcaatccagatccggaactaatcaacattgtagatatcgcccatgcacttccgatgatctgccgggggaacggccaggttagtacgttttggtctgtgggagagcattgtattctgtgtgcgaaggaagccgtagccagaggatacagcaatcgtgtgatcgagggtgcacttttgcatgatgcaagtgagtgttacatgtcagacgtgccgcgtccgctgaagcaatttatgacagtatataaagagcaggagaatcatttgcttgatgttttgtataccaagttcctgggttcaccacttgatgagcaggaagagaagctgatcaaagagattgatgatgcggtattgtggtatgatatgaaatatttactgggtgaagactcagaaggagacaagccggagacgtgtatggtacctgattatacggtgagagcattcaaggatgttgagcaggagtacttggaaatatttgaaaaatataaggtcttataaatgctaaaatggtgaaaaggggcggggagttctgattgaaaaaatgtcagaactctccgtttttgtagatatcagtattgtgatcttcgttgcgtattgtttagaaccatagagaggtgtagtgttcccaaaactattatccatttattttacaacagctgtcgcgttcaatcagctggtgcggcacgatgatctttgttgcaacaagattcggattctcaatatgattgatcatctgtgatgccgcctcgatacccagctgcttggaattaatatcaattgaagtaagctgtggagatgtcgatcttgcaaacagagagttgttgaaagagatgatcgacaaatcttcagggatggaaacatgattctgtagacacactctttcaagtgaaacggcaagaatatcatcacttacaacgattgcagttggcggttcatcctgcagtaacagagaagaaattgcgtctatgttatctcctgatacattcagaacttccgcgcagtattccggacggaaagggattccgtgtttagtcaatgccatctggtaaccggtttttctgtctgcggcaaaagtcagtgaactgtcggaacccagataagcaatcttgcgatgaccgagctgatagagatattcggtcgcgtcctctccggcaagaagattatcattgtcaatatataatgtctgatttgtgtactgtgttgcttttccaaccaagatataaagaagtccttcgctgaagagataatcaataatcggatcgtcctttcgagaataaagaacgatgaacccatctacttttccacttcgtgacatagactgaatcgcttttaagatctcatcttcatcttgacctgtcacaacagtagacatgtattgtctctggttacagtagtggctgatgccgcgaattgcttcaagatagaaagcattctcatatacttcacgggcagatgccggaaggataatcccgatcgtgcgggaatactgagaagcaagattgctggcctgaaagtttacttcgtaaccaagttcgatcatcgctttacgaactttttcttttgtttctgtgctgatggatgggttattcttacaagttctggagacagtggaaggtgatacacctgccaaagcggccacatctttaattgttactgccatattttccctcctgtgaggaaatgaggatgtcaggagtctgatacctatttccctttattttcacgtaactgttcagagccaacctccaaaatgctacgcatttcgtcacctactattttagtgaaagaacgcaatgatgtcaaatctgttgcatagttttttgcatagaaactgttgtgagaatgtacaaaaacagagcatataaattgtgcaaaaggcagaaatagaaaatagatctataaatagaattgcatttcgtacaaaacgtacatataattaatgcaaacggttgcatggaataatgcaacgaacagaggcgtgccacaggatgtgatggtatgcagggagatctaaaggagaaattatttacaataaatattataattaccgcaaattaccggatgcattatctttcttcaatggaaaacgcttcgtaccaatggtatgtatcgcatggtcagtaattatttctctgatccttgcagttgtatggccggttgtacagtcaggaattaatgccggaaagcaggtatttggacaggatccgctgtggcttgcatgggtaactgatctgatcaattacaaagatgcaggaaatatggaagcttataaaactctgctcacaacagtaacaccggcccgtttcaaagtcggacagatgattggagcaaccggccttctgcttggtgttgcacttgcaatgtatagaagagttgatgcagaacagaaagattccggtgttacagtggaagaagaaatcgatggatggcgcgatggagaaggcggtggagcagtgaaagatgccaaacgtctggattacattttctgtaatacgcagaaaaaagtaaagtcatcgaaagtggtatgtaatggtaagaattacccggtagtatccgatcattatggagtaatgatcgaggtagaagattaagaggaggaagataaaatgagcgaaagagcagcaggtattttaatgccgatcagtagtttaccgtccgagtatggaatcggttgtttttcaaaaagcgcatatgaatttgtagattggctcaaaggagcaggccagagttattggcagattctcccgcttggaccgaccagttatggggattctccgtatcagtctttttctacatttgcaggaaatccgtactttatcagtcttgatgaactgattgaggaaggggtcctgacacgtgcagaatgtgagaaggtaaactggggaaaagtaaagggttctattgattacgagaagatttataaaggacgctatccactgcttcgaaaggcttatgagagaagtaagatcagtgagaatccggagtatcagaaattcgtgaatgagaatagctggtggctgtcagattatgcactgttcatggctgtaaaaggacgatttgacaatgtagagtggacaaaatgggcagaagatatccgtctccgttggaaatgggcaatggattattacagagaggaactgtattatgatattgaattccagcagtacatgcagtttaaattccacgagcaatggatgaaattaaaggcatatgcaaatgaaaagggaatcaagatcattggagatatcccgatctatgttgcaatggacagtgcggatacctgggcgcatccagaactgtttcagttagatgaggaaaatgttccgacagctgtagccggatgcccgccggatggattctctgcgacaggacagctgtggggaaatccgctgtaccgttgggactatcatagagagacaggatattcatggtggatttcaagactgcattatgtattccagatgtatgatgttgtcagaatcgatcatttccgtggatttgatgaatacttttcaattccgtatggggcagagaatgcgatcggaggacattgggagaaaggtcctggaatcgatctgttccgcaaagtggaacaggcacttggatggaagcaggttattgccgaagatcttggttatgtgacagattctgttcgtgagctggtccgcgagagtggttttccgggaatgaaggttctggaatttgcatttgattcccgtgactcaggttgtgcgaatgattatcttccacataactacccggtgaacagtgtggcttatacaggaactcatgacaacgagacaatcgttggatggtggagcagtatcacaaaagaggagcagaaactggcgagagattacatgtgtgaccagtacacaccggaaaaggaattatataaatctctgatcagcctgattatgcggagtagtgcaaagctgtgtgttattccgatgcaggactatttagggttaggaaataattgtcgtatcaacactccgtctacggtaggaaagaactggaagtggagagtgaatacaagacagttgtcattgaaattgcagaaggaaatccaggagatgacacttagatatggaagaatgaactgggagacagtcgagtaggattctaaaagataaaatttcatgaaaaagagacggaggtttctaattacaaaatgtcagaaacctccgtcttttagtcttctttaacatagttgggttaaactactgtcttttttctcaacgtccaaagagcaacaatcagtgtcaatatctcagctgccggaactgccagccagattccatttaattccaagaacctcggaagaactgtcaggaaaagaagcagcagagcaaaggaacgaaggaaagtaatcatacctgagatatatcctttgccatatgtcatcatacggattgctgcgaagatattgattcctgaaaataagaatccgagtccatataagcgcagtccggaaactgccatgtcaaagactgtgctgccgggagatgcaaagaaacataccccaattggtgccagcagataagtgcatccgtagagaatgatcggtgcaatcgcaaagaagcgataagcgtacttttctaaaacacgacagacagagaaatttctgtctccgtaagcatatcctagtggcgttgatagtcccatagaaaatccaaaataaattccgatacataagaactgtaaatacatgatgattgaaacagcagcaacgccgtcttctccggcgaaaagtagggcacttcggttaaagataacggttgtgatcgcaatcgcaagctggtttacgaattcagaagttccgttgaccatgctatgaaatgcttcctttatagataatccgtggaatgtaaaatgaaggaagttcggatgtgttacaaagtaaaccactcccattacaaaagaaagcagcaggccgaggaaagttgcaagtgcggcacctgtaattcccatatggagctgtccgataaaaatgtaatcgaaaacaatattaaaaatccctccggaaagtgctgtcagaaaactgtacgtcggagaaccgtcaacacggatgaaataagtgaacatctcttttccaaccacgatcggagcaccgaacagccaccagtagatataagctttacaatcttccatcaacagtgaggttgcaccaagcatctgcaggatgagcggcaaccggaaaagaataagcgcagagacaagagcgccaatgacaatggcagcagccatgcttaccgagaaagtccggctggcttcgtcatttttctttccaccgatatgaagagcagcaagcgcacttccgcctgtcgcaaaggcaagtgcgataccgtacagaatatttacaagcggatagacaacgttgatcgcagcgagtgcatttgttccaacataagcagaaacaaagattccatcaacgatcgtataaactgtagtaaataatgaggtcagataagttggaatgataaagcgtaataatttctttaatcgaatctcatctaccgaacgaaatataagagttttttccataaggaagcctccttgttaaaaaaatatcttagtataggataaaccttaaaggtacttgaaggtcaataaaaagattgctaaaatacaagtagcaagatgtcggtatcttcatgaacgatgaagagaaaaagatcatctaatcatcaagaggaggtggaaaatatagctttggaatttcaaataggagagatatcccatttctttgacattcccgcatctacattgcgctattgggaagagatgcaggttctatcgccgaacaaaggggagacaagtcattatcgggagtatgcggtagaagatctaatgacaatttctgatgtgatcttttataaaaatctcggatttcagttaaagcagatccgagagatgaaatccaatacaccgaaacaacaggcaaatctgtttgaacagaagttatcggagcttgaacaggaacaggaactgctaagacttcgaatgaaaaaactgcaaaggcatattgaggcggtgaagacgttggagaaattgagacagacgccttatcaggaaacagagatcgatacggagtgcattgtctcttttgagttgattgagcaggagaagttacttcaatatattgaagatccgtatctttattcccgcgtacagcatacggacacgctgcagcaggaacaacgtggtctgactgtcttgccggacgcgagcaatgtgtttgacgagtcacatattatctggcgtaagcatggcggcagatatatgacatttcttatgaaagaagaagttgccgagaattatccaaatgacttgcagaaacatatagaatatctacagcaatatcataaaacaggggatgtgatcagtcgctttctactctgcgcacaggaagacggtaaggtatatgatttctataagacctttgcagagatttgctgatcattatgaataagaagaaacgatactagcgtggaaaaatatgcaaaacatagaattcacaaataaatcaaaaaatgggattgaaattcgcagaaacagtgactataattttttagttagtaagagaagtaatgagtggatgaaagacgtctaaggaggagttagatatgagcaatcaggagaatgtatttgaaacaattttagcacctatgaccggtacagcagtagcaattacagaagtaccggatcctatttttatagagaagattcttggagatggagttgcaatcgttccgacagaaggtaaggttgtaagcccggttgacggaactgtatcaaaagtagcagagacaggtcacatttatgctgttacttccgataacggagtagaagttgtgatacatgtcggacttgagacagtcgcactgaatggaaaatgtttccagatccatgtaaaagaaggagacaaggtaaaagcaggagatctgcttgcagatgcagaccttgagtttatcaaagaaacaggacgtaattccatcacaccgatcgtcatcggttcaagccttgaagggaaagagcttgtatgtgaagagggagaagttcaggctggaaaaactgttattatggaaatcaagcagaaataagaagtctgaagatattgttccagaatcgatttagcttagaaggaaggttatagtatgaaagaagaaagatattcaatcatattcagcagcaaaacaggaaatacagcagagctggcaaatgcgattcgtgatgcattgccgcaggagaattgtgattatttcggaacaagcgaaatcgaagaaccggtatcggaaatgctttacattggtttctggacagaccagggaaatgcagataaatccgcattggagttattgcaaagaataaagaataagaaagtctttctgtttggaacagccgggtttggtgagaatgaggcatattttcagaaggttctgaataatgttaagagttctatggatgaaagcaatcaggtagttggtgagtatatgtgtcagggaaagatgccgcaagcggtgagagaccgttatgtgaaaatgaaagagcagccggatcatatgccgaatcttgatctgctgatcgcaaactttgaccgtgctttatcacatccggataaggaagatctggataaactcagagagttggttagagggtagaaaagtaaagaaaattttgtttgacttttaataaaacaggaaatataataactacaaacgagtagcaagtaagcgtaaatccagtttaccggctgctcgttttcttattaaaatagaagtaactgttcagaggcaacctccaaaatgctacgcatttcgtcggtgtggcgtatccgccaaataaaatttcaaaaacagtcttaaaaatgcaagcattttacacctgttttatgaaattttgcttggctctgaacagttacaaatagaatatcgccatgaaaaagtgtgtagcctgtcagcgtaagtccagcttataagacaaggtgcgcactttttttgtgcagaaaagagaggagttaaaacaaaatggcggaaagcaacaaaatgaaggatatgccggtgaataagctgatggtccagatgggaatcccgatgatcttatccatggcattgcaggcggtctacaatattgtagacagtgcatttgtaggaaatatgagagtgggcagtgaggcagcattaaatgcattgacactggtattcccggttcagatgtttatggtagcagtgggaatcggaacaggtgtcggaaccaatgcacttctggcaagaacgcttggccaggggaatagtaaaaaagcagcaaaggtggccggaaacagtctgttcctgggagtgatcatttatgtggtttgtttattgtttggcatctttggagtgaaagcatacatttcatcccagacagtagatgcagaagtttttcagatgggtgtcagttatctgcggatatgctgcgtgatctcttttggaattattttcttttctttattcgaaaagttattacaggcaactggacgatccctttattccacgatcggtcaggtggtcggagcagttgtaaatattattcttgatccgatcatgatttatggtattggaccttgcccggaaatgggagtgaaaggcgcggcctatgcaacggtaattggtcaggtagcgtccgcagtattgctgttcattttccatataaaattgaataaagagtttgagcatggagcgaaatatatgaagccagatgcaggtgttataaaagaaatctatgcaattggacttccggcgatcattgcacaggcattgatgtcgattatggtttatgtaatgaatctgatcctgaagttcaatccgtcagcacagacagcatatggtttgttctataaggtgcagcagtttgttctcttccttgcatttggccttcgtgatgcgatcactccgatccttgcatttgcttatggaatgagaagtaagaagagaataaaggatggaatcaaatatggtctgatctatacgattgcattaatgattcttggaattgccattacagagattttccctggggcgttcgcgacactgtttaatgcaggacagtcaagagaatattttatcggagcaatgagggtaatctcagtcagctttctgtttgccggaattaatgttgcttatcagggtatttatcaggcattggacggtggtgtggaatcgctggttatttcacttttgagacagcttatcattatcctgccactggctggaattttttcgatatttgtcagaaatggccagatgggcgttacattgatctggtgggcatttccgattactgaaatagtttcatgttttgtgggatatatgttcttaaagaaaatcagaaaaaataaagttgatgttttaagttaaggaggaagcggagatgaaaaaaagaattattacaatcagcagagaattcggaagcggcggacgttttatcggagaagaagtagcaaagaaacttggaattgcttattatgataaaaatatcattaatgagattgcagaaaagtctggtttatctccggaatatattcaggaaaatgcagaattatcgccgaaaaaaggattattcgcatatgcatttgccggacgtgatgtcacaggaaaatcagtagaagacctggtgtatgaggcacagaggaaagttattttagagctggctgaaaaggagtcttgcgtgatcattggaagaaatgcagattatattctgaaagaccgggatgatgtgctgaatgtatttatccatggggatatgccggaaaaaacacagcgaattatggggttatataatgtagaagaaaaggaagctgtcaaaatgatggcagatacagataaaaggcgtatggcgaattacaatttttatacggatcagaaatggggaaaagccagcaattatacgttgtgtctgaatagttccaagcttgggtacgacagatgcgagaagataattatggaatgtatatgactgtgaaaatgtatttcgaaaaagcttgctatttgtgaaatgggaaatacattttatgaaatacgaaaatgacattacatgttttgtgataagatgtgttcagtaaagaaaataaaacataatgatacaaggagatgataggaatgaaacagcaggtatttaatccatatctgccaagctgggaatatatcccggatggagaaccctatgtgtttggtgatcgagtatatgtctatggctctcatgattcctttggagcaccgattttctgcgtgaaggattatgtttgttggtctgcatctgtgacagatctttctgattggagatatgaaggtgttatatacagaaaaaataaggatccttctaataaattaggaattcgctgtttgtatgcaccagatgttacacagggaccagatggaagatactatctctattatgcctttgacttcatgggcgagatgggagttgctgtctgtaatactccggcaggcaagtacgaattttatggacatgttcattttaaagatggacatgtatggggaaaaaagagtggggaaccatttccgtttgatccggggatattggtagacgatgataagcgagtatatctttattccggatttgctactaaggttccggctgttgcttccagaggacgtaatctgaccaatgaaggcggagttgttctggaactggaacaggatatgattacaatcaaatccggcccagaacttctatttcctacaaaaggaaaaaatggtgcttttcaggatcatgctttttttgaagcaagttctatacgaaaagtggatggaaaatattgttttgtatattcatcagaacacaatcatgatctttgctacgcaatggcagattcacctaaaggtccatttacttatggaggcgttctggtagatattggtgatctttatttgaatggaaatgaagatgagacatatgcctctaattatttaggaaatacacatggaggaatgcttcagatagaagatcaatggtatatcttttatcatcgacagacaaatcgtagttcttatgcaagacaggcatgtgcagaaaaactggaacgtagagatgacggaggctttcagcaggcagaaattacaagctgtggcttaaatcaaggagcgttgaaagggataggatcttatgaagcaagaatagcttgcaatttgtggtcgataaatggaacaggacgatatgatggaaagtcaccgaaacaaaaattgaaagatcatccttatttcacgcagagtggaaaagattgagaaaataatggagatcagtacattgcaaatatgaagaatgggtcggtcgctggttttaaatatttcgaaatgggagaggtaaatcagatcggaattactatacaggggaatgcaaagggaacaatgcaggtttctgacaaatctgattttgaaaatatttgtgcagagattgaagtgagtaacagagagaaagaaatgcatacttataaaggtgccttaaacatcccaagaggaaaaagagcattattcttcagatttcagggaaaaggtacagtagactttcattcttttgaactgatgaaaaattaaaactggaagaaggagaaatgacatgaagaagtggatagaaaaacatccggatttatctttaaagctttaagcaatagaccatttaaattttttgtaagtatcagtattccggcaggattgaataaataaaagggcatgaatctataggcggattcatgcccttttatttatttaaaaattgtttttagcaatttatgtgacatacaataactgtaaatacatgcaatgatttctgcaatccagaaggcataccagccatgtgaaatgccagagatttttataaaaatccaaaggcatggaaccagtaaaataagctgacggatggcagcaccaaccatgttaataatgccatttccaagcccggaggagaagtatccgcaaagaatcgtaattgcagacatcacaaaggaaatggaaataatcctcagtgccggaatgccgagcagcagcatttctgaacttgcagaaaataattgcagcaactgttcgggaaaacaccagaatataacagttccgcacaaggcaatgattgctccggtaggaagtaaaatcttccatgtctgttgtacacgttggtagtttttatcgccgtaattatatcctacaatagatatggcagcctgtcccagtacattgatcggcatcatcaggaaattttgcagtttgtagtagataccaaaaaaggcaactgctgttgcggaaacatcaagaagaatacggtttactacaaatgtcataatgcttccgattgcctgcataatgattgttggaagccccacccggtagatatcagcaacatcttgccacatgaaatgatagtttttcagacggacgtggatgattggatttcgaaaacggttaaacagtaaggcagcgatagcaccagctatttggccaatgacagttgcgatcgctgcaccacggactcccattgcagggcagccaagcagaccgaaaatcataataggatcaagaataatattcaaaacagcaccaatgatcagagacagcatagataatacagtatctccaaccgcctgtaacagtcgctgagcataagtttgcagaaagattccccagcaatatacaagattgatggaaagatattgtttgcagagttcctgaagttctgaatcagcagccagtttagtggcaatcgtatcggacagaaaaatcccgatcattgaaaagataagagacgtaaaaatcatcaggaaaagtccggttgtggcagcacgacatgcttcctccggcttatgttccccaatttttctggaaagcagagcattcagacctactgcagttccgatacctacggcaatcattaagaactgaatggaataaaccaaagatgcagcggtcagcgccgtttcagacagtctggcgacaaagatactgtcaacaatgttatagagtgactgtacgagtaaagacagcattaagggaaccgccatcgtgtacagtaaaggacggattggcatttctgccagtttgtttctggaattcataaaacctccttatggcattgcaaaaaaataagcgtgaaatctgtaaggacaagcaaatcctcatgatttcacgcttttacaagccggcttttgttacaattatttttcttcggacttattataaacgaaagagaagaggaaatgcaagaaaaaaattaaagcagcttgtatcactcagacattgtgtttttccaatcatgacggagaaacgacagagtatgcaaaaaaagcgattgtacaagagtatgagaagtataaagcacagttggaaaagggtggtacaaagtacaaaattttatcagaaaaaacaaatgaagatggatctattgtgattgagatcaagaaacagtataattcttctccggttggtgaatatctgaattaaaaaaaagaatttcacgcatttttttgaaaacaaaatttggttgattaaccaggtaaaagtgatatactgaatgcataagaaaagaaaccgtgtggaattacagttttgttttcacacggttttttagaaaatgagagttagatattactaacatgaacactggcagtttttttgaaaatgaaaaagaggacggatttctatgagaatattgatttatggtgcaggtgtgattggatccttgtatgcggtcttatttgcagaaactggttatgatacgagtatttatgccagaggtaaaagacttgagtttttaaagaaaaatggactgctttataagaaaaaccagaacataaggcgggcagaagccacgattcttggagaattgtcagataatgatgcttacgattttattttgctaactgtcagggaaaatcagctatatgaagcacttgctgaattaaaaaataataaaagcaatacaattgttacaatggtaaattcattggacagttataaaaaatgggaagatattgttggaaaagggagaatattgcctgcttttccaggagcgggcggaagtataaataatgatggtatccttgatgcagcactcactccaagaatgattcagccgacaacatttgcagaaatatcaggaaataaatccgaaaagacaaagcagttttcaaagatattaaggcatgctcatataccatatcagaaagtagtggatatgcatatgtggcaattatgtcatcttgccatggtggtgccgattgcagatgcatattacgaagcagattgcccggaaagagcgggaaaagactggaagattatgaagaaaacagcaaaaaaattgaaaagaaattttagctttttgcgaaaacaggcaggtaggctgtcaccttgtaaaatgaatatttttcgttttttaccactgccaattatgacgattatgcttgctgttacattcgaaagtagctttggagataaatttatgtatcaacatgccagaaaggcaccagatgaaatgagggagctgcataagcaattttatgcttatatgaaaaaactaaaggaggccagatatgaaattttatgaaagtggagacagtagtaaaccagtgatatttttatttcctggtacctgttgcctgtatagtagctttgatcatatactggatagattacattcttatttttacacggtaacagtttcttatgatggatttgatccaaatgagaaaacagaattttattcaatggaagatgaatgcgaaaagattgagcaggaaatcaagaaaaagtatgatggaagaattaaagcagcgtatgggtgttcccttggaggaagttttgtatcccttttgattcagcgaaaaagaattcatatagatcatggcattattgggagcagtgatatggacgaagcaggtcgtcttgtggcaaaaatcaagtcatccatggtagtccctttcatgtataaaatgatacatacaggtgctcttccgaaatttatgcagaaaaaactgaataagacagatgaggttaaaaaagaattatataatggatttttgaatatgtttggaatcggtaaaggaggaaatccgtggattacaaaacagagtatttataatcagttctattcggatctggttacgaaagtccagcatggaattgatgtgccgggaacaactatccatgtgttttacgctacaaagatgggtaaaaaatatgaaaagagatattggacttatttcaagaatccggatattcggagacacaacatgcagcatgaagaactgttttgctgtcatagtacagagtgggtggaagaagtaagaaaggcagtggaaggcgacagataatgaaagaaaaagtgaatgtgacaggtgtgccggaaacgatggtacagaccctgtatgcaagagcaaaagaaacaagaaagaaaaatgctaaaataaacgacgaaattgcagaagaacttgtgaaaaatcttgattatgacttttctaaagcggataaagataaagccatgaactatggcgtgattgcaagaacaattgtattagaccggatggttgagcaatatttggagaaaaatgcaaatacaattgttataaatattgcatgtggactggataccagatgttatcgaatggaaggaaaatatctgcgttggtacaatgtggatttgccggaaacgatgaagataaggaaacggtttcttacagaaacaggtccggtgtatcagattgcaaagtctgcaatggatgcttcctacatagatgatatcgattatcacggtaagaatattctggtaataatcgaaggacttacaatgtatttgtgtgaaaaagatatcagaaagatgttttttattattgaaaaatcatttcaggaagtaaccgtaatggtcgaaaccatgtcaccttttgttgtaaaccatgtgaaagaaaaatccatagagggcagcaatgcaaaattcacatggggagttaagaacggaacagaactgcaaagaattgtgccgggattttctgttcaacaggaagtcagtctggttgaaggaatgaaaaagcttatgccgatttatcatgtgataggaaagattcaaattgttcggaatatctcaaacaaaataatagttttggagaaacgtggccgatattaaggtgatgatacaaatgaagaaaagacattttgatgtggaaatagatggattttatggtgcatactggaaatgcaaaatgtgaaactggcatttcaggcagcaagaaaatatccggaagaatgtcgcagagcacgactggatattgaccagcgggtgagaaatgctgttgctgaatggaagagtgcagaaaaatagattaaaatagatagaaggtgtaagtatggtatttaaaacaataggagataaattaaatccagtcatcttgtttttccatgcaatgggagtaattggggaaagtagtatgccggttgcagagaaaatgaaagaaaaatattactgtattatgccaacatcaaccgtgtattgccctggacagagatatcaaagtaaaagagatgagatacagcaaattgtacgatttctggaaaatcatagaatcaaagagatagaacttgcagttgcatcttcgattggtgcagatcttgccatggcattcctgacggagacaaaaataacggtaaagcatgttttttttgatggcggacagtttgcccagattggaaaagcaactcgcagaatcatggtcccgttcttatatatagcaatgaaaagtttatattggtcaaaaggaaaaacactaaagagaatcatgtggtgtgacgatgacaaaattaaaccctattttatagaggcagggaagaacttgacatatgggaatctgagaagacagctggcagacagcttggaagataaaccatttccagaactgtcagaagaattgcagaaacatacattttgggaatttggaagtatagaagaacattttaaatacagaaatgcagtgatgcagacatatatacacggtaatttcccggtttttgagggatttaaccatatgcagtatcaaattcgcgacccggaagggtttgccagaatgttggaaacaattattgagattgatcgattacctgaattgacattttgaaagaaggtatcagaaaaatgttattattgttgcaaaatgtattgtactgtctgctgtatgcatcactgataaaatgtgcagtgaggaacgacgggcgtaactgtttatatttttatccaaaagaatatatagaagaagcacagaaacgtggaattgctgataaagaaactgtgatgaaaaggtcaaagtggtttatgataccattttgtattattatatttgtggttctgattttgattatttctgtttggaatcatgttatggattttaaaacggcatatcttcaagcctgtctttttcttgtggtcatgaactggtttgatggtattgtgattgacagattatgggtggagcacagcagaatctggcatatagatggtatggaaggaattccgtatgtaaagccttggaagactgtggtggtaaaacgaggggcggctactgtactgtatttggtggttgcatttgtagtagccgggattgtggaattacttggtaaaatatgataaatttcagtttcattaagtaaaattcgtatgtaaatgacaaaggagaacggaaacagaaatgggagacctaaggaaaagagcaacgattgaatccccatagctatcggctaaagggacgcgactttgttcaccaaggtaaaatcgaagttgatgtaaacgaaagggcagtttttatcagaactcaaggctgctttttcgattacaccaactccgattgtttccttaacagtttgtcgagtaattaaagagagtgtgaaagcgaaagttaagggggataacaattatgagcaataacagagatttcaagaaagaatatgatatttttcagcaaaaattcccatatcaaacaacggttgtggatgccatatgctgaaaaacttagaaagagatacagatttctgatctatgaacatttaatttgtactttttcctgacataggaccagtatctgctaagtggaaactgaatacaagggaaaataaaaaatctaaacagcagacttgacaaattcctgtaatgagttaaaatataacagtgctatatagcactgttatatttttggaaagaagtttagaggatacgaaaagaatgccgacgaaagcagaagatacacagaaaaacatattagatacagccagaaaacattttctgaaagatggtttgacaggagcatctttaagaaatattgtaaaagatgcagggcttactactggcgcattttacaaatattatccgacgaaagaggcactttttgatgcactgacggatccttatatggaacatatttatcagatttatgaccagatcgttgaggagtttgaaaagctttctgccagtgatcagacaaggaatatgtcggatacatccagtgatgggatggagcagatggttgattatatctatgatcattatgataatttcagattattgttgaaatgcggagacagtggaaaatttgaattattcatacacaatatggtagagcgggaaatgaagtccagcttgaattatatggaaaagatgaaagagaacggtgtaaaaataccgattgtagaggaaagccttatgcatatgatttatacgggatttttttcatcagtatttcagatcattgagcatgatatagacagggagactgcaaagaaaaatgtacatcaactgaaagaattcaatacaggtggctgggaacgattgtggaatattgaatttccagtataactgatgcaggaattctgaataggttatgtgtgttgcaggttctggatttctgaataaagttcagacgggataataatatcaggtggttgatgccagtagaccacctattttattatatgctggttagtgagaactaacagaaggtaaaacaataaaacgaaacaataaaacgaacgtaaggagtgaacagatgtgaaagaaaaaaagaagtcggcagttagttggatcctgacgtgggccggacaaaaaagaattgcctatgtgtggagtgtgttacttgcaatagggaatgtgatttttaagattttgccgtattttattattgcagatgtagtaaagctgtttttaaatggtgaaaaggagtttgaaatatatcttgcaaaagcggttctgattgcattatcgtttatcattgcagaactgcttcattcactttcgacagcattgtcacataaagcaacgtttgcagtacttgcaaatataagaaaatcctgctgtgacaagctggcgcgggtacctcttggctatgtgaaagacacaccttccggtacatttaaaaatattatggtggaaagaatcgacagtatcgagacaacactggcgcatattgtcccggaattcacgtccaatctgctggcaccgattgtgattttgatttatttcttcctgacagactggagactggcactctggtcattggtgccggttatagtgggatttctttcctattttggaatgatgctggattataaaccaagcttcgagagaacggttcagacaacaaaagatctgaatgatgcggcagtggaatatattgacggaatcgaagtgatcaaggcatttggaaagacagaaagttcttatgcaaaatttacaaaggcggctatggcttatgcagattcctttatttcctggatgaaacggtgctcgatctttcatggactgatgatggtggtcacaccttatacgcttcttacggtattgccgtttgggtcacattatgtagccaatggaacacttgcgatttcagattttgtcatctgcattattttatcacttggaatcgttggaccgttgatcacagtgggttcttatacagatgatctgggcaagatcggagtgattgttggtgaagtggcaggaattctagaacagccggagcttgaacgtccagagaaaagtaaaagtgttccaaaagataactccgttactcttgaagatgtcagatttggttatcacgacaaagaaatcctgcacggagtaactatggagctgaaagcaggaacggtaaatgcaatcgtaggaccttccggaagcggcaagtcgaccatcgcaaagctgattgcgtccctgtgggatgtggattccggaagcatcaaaatcggtggagttgatgtcaaagaactggcatttgcagattttaatcggaaaattgcatatgttgcacaggacaattatctgtttaatgaaacagtccgtgaaaatatcagacagggaaatacggatgctacagatgaacagattatcgaggtgacaaagaaaagtggatgttatgaatttatcatgcagcttgagaatggatttgatacggttgttggaggtgcaggagggcatctgtcaggaggagagagacagcgtatctcgattgcaagagcaatgttaaaagatgctccgatcgtgatccttgatgaggcaactgcctacacagatccggaaaatgaggcaattctgcagaattctatcgcaaaactggtcgcagggaagactctgattgtgatagcgcacaggctttctaccgttaaggacagtgatcagatctttgttgtaaatgatggaaatgtagcagcacatggcacacatgaggaacttctggtgtcatgcccgctttataaggaaatgtggaatgcccatatttctgtaaaagatacggtgaaggagggagaatgatatgtttgggattctggcaaaattctttcgtttttcaggcagggaaaatggcaataaatttaaactgtcgatagtgatcggactcatagaggctcttgcctcagcaatgaagattccggctattatgtacatactgattggtctgctgagtgggaaaccgacaggaaaatatattggaggctccgttgcgattatggttcttgcaattgtagtcgacgtaatctgcaagagatactctacagtgcttcagacagagggaggatataatgcaagtgcttttatgagaatcaagattgcagaacatctgcgatatctgccgatggggtatttcaattccaatagtatcggggaaatttcttccattacaaccaatacaatggaaatacttggcgatgtggctgcgagagtggtcatgctgaccatgcagggaattctggaaacatcaatgatcattcttatgctgtttatttttgactggagaatcggactgatcgctgcagcaggagtacttattttctttggagtcaattctgtgatgcagaatgcgggtaaaaaagattcagagcaaaaagtggtatgcgatacggagcttgtaaaccagatcatggagtatctgcagggaatatcagaagttaaatcatataacttgcttgggaaacaggcgaaaagattaaatgatgcaaatgaagcatgtgaaaagatcaatacaaagatggaaatgctgtttgtgccctatcattttctgcaaagtgtgataaccaaaattacaggtgctgtgatcgtggcttgcagtgcatatttttatattaatgtaactatgagtgcggtctatgcaatcggtatgacaatttcagcatttatgctttatgccagtctggaatgtgcaggaaattattcatctcttttacatgtggtaagcgtatgtgtagataaagcaaatgcaatactggggctggacaccatggatatcgacggcaaagagatccagccggaaaattacgatatcagactttctaacgtttcattttcctatgacaaacggaagatcattgatgatatatcgctctctattccgcagaaaacgacgacagcaatcgttggaccgtctggtggaggaaaatcaacactttgcaatctgatcgccaggttctgggatgtggattccggggaagtgacacttggaagcgtgaatgtaaaagactacagcatgaacagtctgatgcgtaatttttcatttgtatttcagtctgtgtatttgtttgcagataccattgagaataatattaaattcggacgtcaggatgcaagccatgaggaagtggtggaagcggcgaagaaagcatgttgtcatgatttcatcagcaaacttccgaatggatatgacacagtgatcggagaaggaggagccacactttccggtggtgagaagcagcgtatttcgatagccagagcgattatgaaggatgcgccaatcgtcatattagatgaggcaacagccaatgttgatccggagaatgaaaaggatctgatgaatgcagtagatgcacttacaaaggaaaaaacgattattatgattgcccacagattaaaaacagtcagacatgcagaccagattgtggttgttgacaaaggaagaattgtacagcagggaacacatgagcaattaatgaaacaggaaggtacttataagagatttgtggatgcaaggcagcaggcggtaagttggaaactggtgcactgagaaataatccacagttggtgaatatccaaattgaattgtctgaaagagatttaatttaagtttcgctaagtttcacttatataggcagaatgagggatattcaataatgtaatatgaaaaaagcactgaaaaccgttggattgcaaaaaaaaaatcttaaaaaattagcactcacctcttgttattacagcgtagcttttgtcttagttcatagagtgccgtaaagtgcttatttacaggctttttacgggttttatgaatttatcacatttcatcaaaaatcgtcaatatacaaaaatttggtgtcaaaattggtgtcaaataaccttgatttgagattttgatgagcaacacatcagtataaaaaattgaatattttatagattatggaacgcctaaaatgacgttccttttctatttccagccgttcttattggacggctattttattacccaaaatgaaaggagcattagatttatgaaaaagacatggaaacgattgtgtacgggcttcttagttcttgcaactgtcgttactgctttaccgactacacccgttcatgcagaaagcaagcaatactggacggaaagtgcagagcgtgtcggtatcattgaaaaagtaatgaatgacggttctatcggttcgacattcaatgagggctatatgaaagtcgagggcgaaactgcctattgtattgacatcaatacagattttaagaacggctacaagaccagaactgacgcaagctcacgcatgagtgcagaccagatttcagatgtggcgttatccttagagtatgtcaaacagtatggcgaagctcacaaggaactgaactacaaacaagtctatctgttggaacaatgcgttgtctggcagagattgagcgtacatcttggctggcaatgtgataacgtgcgagcttcttatgatgaaataccaaaagctacgcaggacgaagttttctctggtgcaagagcctttgtcaaagaaaataaaggacgctatgaatgtggcggttatatctactctggcgaggggcaggaattaggacaattctgggcgaagctgaatgtcggaaatgcgaaactgcaaaagacttccagtaataccagcattacagacgataatggtaattactcaatcgctggtgcgacctatggtgtcttttctgataaagactgcacgaaacagcttgccacccttacgactgatgaaaacggaaatacagatattgcagaggtaaaagcaggcacagtttatatcaaggaattatccgcaccagcaggatataaagtggataaaactgtatattccttaaaggttgaagctggaaagacagcaaccttgaaagtatcagatacgccaaaagtaacggacactttgattgagcttttcaagatagatatggaaacacagaaagacaatccgcaagggaacgcttctttagcaggtgcggaatttacatggaagtattatgctggcttctacaataaagacaatctccctgccgaagctactcgtacatgggttacaaagacaatcgctgaaacagacagcgacgggacaacccactacatcacaaaattagcggacgaatacaaagtatctggcgacagcttctatatgcaggacggcaaaacggttcttccacttgggacgcttactgttgaggaaacaaaagctccaaacggctacttgttagacggtgcatatatgcaggctggcgataagtccgaacagattaagggcttatatgtaacacagattaccgaggacggcgaccttgccgtattatctggaagtaaccagttttccgtatcagacaaggttatccgtggcggtgtaaaaattcagaaacgagatttagaaacgggcgatacgaaaccacaaggaagtgccactttgaaagatactgcctttgacatcatttccttaaatgataatgcggtattggttgagggcaagctatacaagaaaaatgaagtggtaaagacaattcgtacagatattgagggtatcgcttctacttctgctgaccttttaccttatggaaaattccgtattgttgagagtgaagctccaaacggttacttaactgacggtgcaaaaccgattgactttacaatcacagaaaatggaaaaatcgtggacttaaccgacgaagctcattctatctataatcagattaagcgtggagatattgagggcgtaaaaattggtgcaggcacacacaagcgtcttgctgatgttccgtttcggatcacaagcaagacaacgggcgaaaatcatgtattggtaactgatgataacgggcaattctccacttctgctgattgggcttctcataagcacaatacaaacgcaggaaagaccagcgaggacggtgtgtggtttggaacttctgaaccagacgacagcaagggtgcaatgccttatgatacctacatcattgaagaaatgcgttgcgacagtaacaaaggctttgaacttatcccaccttttgaaatcgtggtatcaagaaataatcttgtggttgatttagggacgctgactgatgaatacgaaaaagaaatctctatccataccacagcgaccagcaagaacggcgaaaagactatccttgctggaaaagaggtaacaatcgttgatactgtcaaattggacagacttacaaaaggcacaaaatatcagctcaaaggctggcagatgttaaaggaagaaaatgccgagcttatcattgacggaaaacgtgtgaaaaatgactatacctttgtcgctgatgaggaagaaatgaaagtagaaatttcttatacattcaatgcgtctgctttaggtggcaaaaaccttgttacctttgaagaattgtatgatttcagcaatccagacgaacccgtgaaagttgcagaacacaaagacattgaggacgacgggcagacggtacttatcacagagcgtatcatcaagatacatacgaccgctaccgataagaacggcaacaaagagcttgaatctggaaaagacgttacaatcattgataccgtaaccttagagggcttagaagtcggtacacagtacaaacttgtgggctggcagatgttgaaagaagaaaatgcagaacttcttatcaatggaaagcgtgtggaaagtgattatacgtttaccgctgacagcgaagctatgaaagtggaagttgcctttacctttgacgctacttcccttgacggcaaacagcttgtaacttttgaggaattatacgatttaagcaatccagacgagccgaagaaagttaccgagcataaggatattgaggataagggacagacgattacctttaaggaaaagccagaagaaccagaaaaacccgaaacaccaccgacaccagaaaagcctaacagacctagcgacagtcccaaaacgggcgacagtacaaatgtaatggcttttatcgtgatgttgcttgcgtctgctggtggactggctggaacatatctttacaaacgccgtaaaatgaagaaatcataaggcggtaacggtatgaggaaagaaaaatcacgctctccgccgaagctgtcaaacggcagacttccgcttattctggcttgtctgcctacaacctgcaagaacacagatagtcaagggggcgaagcatttattttaccctttactatctgggggattgctggtacttcccgaactgccagaataagaaatcacaatcaattaacttataaaaaatagaaagaaacgaggtaaaacaatatggaaatgaaatatgtcgtgccagatatggcacagtcttttggaactcttgaatttgcaggcgaaagcgagccagtctttgaaaaagataaaaataaccgcagggtcttaaccagacgaagctataacctttattctgacgtacaaaaaggcgaaaatgttgtggtagaaattcccgtgcaggctggcgaaaagcatttcaagtatgagcagaaagtaaaacttgtcaatccgaagttatacggcagaggttacgcaatcggggatatgggacataccgattatgtgttagttgctgatgatattgtagcagttgaagaaaagtaaaggagtgaagaatttatgagattatcaaacgggtttgttattgacaaagagaaaacatttggagaattaaaatttacagcggtgcgtgatgtgttcttgcagaatgaggacgggacaccgagtacccagcttaaaaagcgtatctatgatttgaagtgcagtctgcatggtggaattatccccgtgtccgtaccgccagaagtaccgttaagggaatttccgtacaatgcagttgtggagcttgtcaatcccgtagccgatacggtatcaagaaagacttatacgggtgcagatgtggactggtatgtaaaggcagaggatattgtattgaagaataaaggcaaccagaacgcaggcagtccacagaaccctacaacgcagggacagccgaagaaataaaagtgatgtatttgtcttaattttgattgacacaaacaatgaggagtgatatatttatctcataaagatacaaaaacatctcatttgaaaggagagataaatatgtcaaagaaacaaattaaaaaaattatttttatgggggtagggtgtgctttattgcttattgttggtacaatctactccctattatacaataatggacgctgggtcaaaaatatggatatgtcggaatatgtattttcttacaaggatattcctatgttagtaattggagctttaatagcactatatgctatctatataataattatctgctttaaaaatgtctttttaaaaaacagcagggaaaaacgatattcaagaacaatttctccttactggggattttgtggaatgtttggttttctggggtttggcggattttggacatactataaatttggagaaatatttccttttacttttttcatattttttggttttttcagttttttctttgaaggtaaactttctcatatcttagaagatgagctttttcaagaaaataaacgtaaggcacaattagaagcctacaagataggttttaaactattatttgtagttatctggcttatggcaataggtatgttttcccgtaatgttgaatggtgtgcaatgtttatgctgatttctgtttcacttatctatgctcttgttctttttcttagcaactatttattatatcgttatgaaaaaagggaataaattatggaagcaaagtttgtatgtaatttaaaaaaatatcgtgtagcacaagaattaacacaagaacaactcgctgacattgtaggtgttcgtcgtgaaactattatgagattagaaaaagcacaatataatccgtcacttaaattggcaatagatatttcaagagctgtaaaagctccgatagaagatatatttatttttgaataaagacagtttaaagcagttagtcttaggattgactgcttttttcgtacacagaaaggagagattgttttatgcgtaagatttggaataaaggacaccgtatcagagccagcgacaagcaccttgtttaccacttttccataggaacgcttctgtttgtattcgtggcggttctcctgctactgaatatgaaacagctcatgcgtaccgattgggaacatttcagcttgttagaaaacggcttgacgctctccccttacaacttcataactatactgatagcgactggtgtttgtgcattggtcgcttttctgtattaccgcttctattacgacagtttcaagaagctcctgcaccgtcaaaagctggcaagaatgatactggaaaataagtggtatgaagccgatactgtacaagacagcggtttttttactgacctgcaaagcagatcaagggaaaaaatcgtctggtttccaaagatttattatcaaatggaaaagggactgcttcatatccgctgtgaaatcacgctgggaaaatatcaagaccagcttttacggttagaggataagctggaaagtggcttgtattgcgagctgactgacaagaccctgcatgacggctatattgaatataccctgctttatgatatgatagcgaaccgcattcccattgatgaagtacgggcagagaacggctgtcttagattgatgaaaaatcttgtctgggaatatgacgcactccctcacgctctgattgctggtgggactggtggcggtaaaacctattttttgctaacgctcattgaagccttactgcataccaacgctgtcctttatatcttagacccgaagaacggtgaccttgcggacttagggacagttatgggaaatgtgtatcataccaaagaagaaatgattgacagcgtcaatgccttttatgagggaatggtacagcgaagtgaggaaatgaagcgatacccgaactataagacgggcgaaaactacgcctatctgggactaccaccctgctttcttatctttgatgaatatgtggcgttttttgaaatgctggggacgaaagaaagcgtgagcctacttagccagttaaagaaaatcgttatgttagggcgacaagcaggctatttccttatcgttgcctgccagcgtccagacgcaaaatatttctcggacggtatcagagataacttcaatttccgtgtgggacttgggcgtatcagcgaattaggttacggtatgctgtttggttcagatgtgaaaaagcagttttttcagaagcgtatcaaggggcgtggctattgtgatgtgggaacaaacgttatcagtgagttttacacgcctttagtgccgaaaggacatgattttttgcagactatcggctctcttgcacaagcaaggcaggacgggacggcgacgtgcgaagcgaaaggcgacggcacggactagccgttgctggtgtggcgtaagccacgccagcaggtaaaacccctcggtatctaacagaggggtacgtttgcaaatagacaatagacgaaaaacataggaaacataaggcttctggcatggtttcctagtaaaaatcggctgtgaagtcgccttaaaaaacttcacactttacagattgggggtatggttctgaatgaagaacaatggataaaagaattacgggagaaacggattgcttacggtatctcacaaggcaggctggcggtggcttctggtatcacaagggaatatctcaacaagatagaaagtggaaaaatgaagccgtcaaaggagcttttggaaactctacataaagaactggcaaggttcaatccagaagcaccgcttaccatgctgtttgattatgtaaaaattcgttttcccacgctggatatacagcatatcatcaaagacatattaaaactgaatatcaactatatgctccatgaagattacggacattacagttatacggagcattattctttaggggacatctttatctatacgtcggctgacgaagaaaaaggtgtccttttagagttaaaggggcgtggttgcagacagtttgaaagttacctgctggcacagcaaagaagctggtatgacttcctcatggacgcactcgtagacgggggcgtgatgaagcgtattgaccttgctatcaacgaccatacgggcattttggatattccagagcttgcggaaaaatgcaggaaacgggaatatatcggaaaatccagaagttataagttttaccagtcgggcgagcttattaagcacagagaggacgacagagaatatatgggacataccctttatcttggttcgctgaaatcagatgtgtatttctgtatctatgaaaaggactatgagcagtatgtcaagttagggacaccgcttgaagaagccgacattatcaatcgttttgagatacggcttagaaatgaacgagcctattatgcagtacgggatttgctgacctattatgacgcagagcagaccgccttttctatcatcaaccagtatgtgaggtttgttgatgaagaaccagacaagcgaaaaaatgactggaaactcaatgaacgctgggcttggtttatcggcgataacagacagagcttgaagctgacgacaaagccagagccttacaccttagaccgtacattgcggtgggtacaacggcaggtagcaccgaccttgaaaatgctgaaaaagattgataaaggaaacggtacagactacatggaaacaatcgaacagcaggcaaagctcacagaaaagcatgaaatgataatcaaacagcagacgacccctgcaaaagatttggtggaaagttaggagtgataaaaaatgtgggtattattaaaagacttcctgctggtatctatgggaatgggtatcggcgtagtcttgatgtgtattttgaatgtcggcaaagaagctgactatgaaatgaaataattaaaagaaagcgaggacaattaaatgaatttcggacaaaatttgtatcaatggtttttatcaaatgcacagagcttggtgcttatgtcgatcgtggttatcggtatctacttaggtttcaagcgtgagttttccaaacttatcggcttcttggtagttgccttaattgctgtcggcttggtattcaatgctggcggtgtgaaagatgtactgttagagctgttcaataagattatcggtgcataaaatattgaaattatctttaattgcagagcaaaaaatgatatgataacataaaatctttcataaaaacaaaatacattctttcgtgctttttaagatttttactgtatcattttatttaaaattactgtgaaaggacgattactatgttatctacaatttatgctttgctatgtattatagttccttgttccttataccagcttattatttgcaagcgtcaaaacaaaaaacaagaaaacaaagcaattcattttgtatgggtatatatttttctgttatatatctacttgacgttctctgttgcaggtataggtagtatttgggatattggacattatgatacgattataagattagaggaaatcaatttattaccgtttcagtctgaggggataatgacttatgttttaaatattataatgtttttacctctgggctttttaattcctttaatttggaaacgatacagaaatcctctgaaaatttttatgataggcttcggtttttcattatccattgaactttgccagttattcaatcggagaaatacagatattgatgatttaatgatgaatacgctaggggcagttattggatattttatttggaaattgacaaaaaggttatttaaaaatattaaccataaatctatttctctttctaaactagaacctattgtatatttaactcttgcagttttaggagaatttctattattcaactggagaatttttctctagtgctaacaaaaatatttacacaaaaggcagttagtcttaggattgactgcttttttcttatcaaaatttcagattggagtgatgaaatgagcgatatttttaaggatatgcaggtaaacgtcggctgtgaatatctttctgacctaccctcttacaagcgtaaggtgtggcaggaaatgaaacggttgaacactgctgactatgaagaaagacagttagaagatttttcaaagtatgtgtttggtatgtcgtaccagaccatacaagatgtgatgaaacaacagaaaggacgtgaagaacaatgcaggaaacaagggtgctggtggaaacgagaggaacaactggcgaagaaacaacatcatactggtttgacctgccgatagatgttgcagagtttgaagaaaagctaggtatcggtgcagaaagtgggaattaccgcattatcgaaaaggtgttgccttatgctgatgaagtccacgaacataccagcgtgtatcagctcaacgaattagattttatgtaccgccagctttcaagtgatatgcaggaagaatatgtatcactacttacggtgtttgagaatttagaagcactttatatttgcaggaacgtgattaccgtttatcccgactgcaaaagcatgattgatgttgcaaggcaaaagctgatgaacgacccgacatttaagcatttatccgaggactgtcaagaatactattttgattttgaagcctacgcttctcacttgcaggaacacgggaaatttttagtaacggaacacggtatctttgaactgccagagtaggaaatgaggtggtgcttatgattgatgatatggcggtttatattgctaatcttggcaaatacaatgagggttatttagtcggtgcttggttcacgtttcctattgacgaggaagatgtgaaagaaaaaatcggcttgaatgaacagtatgaggaatacgctatccatgataccgacaactttcccattgcgattggcgagtatgtttccattgaagaactcaatgagatgtatgaaatgatagaggaacttcccgactatattgtagagtgtctggacgaatttatcagccactatgggacgctggaagaagtcgtggaacataaggacgatatttactattatcccgactgtgaaaccatgacagatgttgcctactactacatagacgaattgcaggcacttggggacattccacccagcttacagaattacattgactatgaagcctacgggcgagatttggatatgggcggttgctttattgaaacaagccgaggtatgtgcgagataccatattaacgctggaagatcagcgacaagcatggttgctactgacagcgtatttctcttttaagggacagtctgaaaatggctgtccttttctattttgaaaggagctgaaagaacttgaaaaagattaaaagctacacgggtatctggaacgtggaaaaagtcttatatgcaatcaatgactttaacttaccctttcccgttacttttacacagattacatggtttgtgattacggaatttatcatcattctgtttggggatattcccccactttccatgattgagggagcatttctcaaatactttggtattcccgttgctctcacttggttcatgtcgcagaaaacctttgacggaaagaagccgtacagctttttgaaatcacagataacctatgccctgcgaccaaaaatcacttatgcaggaaaagccgtaaaactgcataagcagaccttgaatgaaacaatcacggcagtaaggagtgtgaactatgttcccgataaaatatattgacaataaccttgtctggaacaaggacaatgaagtgtttgcctattatgagctgataccgtacaactattcttttctatccgcagagcagaaatttatcgtgcatgacagctttcgccagcttatcgcacagtcccgtgagggtaaaattcatgcgttgcagattgccacagaaagctcaatccgaagtatgcaggagcagtcaaagaagctggtaacgggaaaattaaaggaagttgcctatcagaagatagacgaacagaccgaagcgttagtatctatgattggggacaatcaagtggactaccgcttttttcttggctttaagctcatggttacggaagaacagctcaatctgaagaacatcaaaaaatcggtgtggctgacgttcacagaatttctccatgaagtgaaccacacgctgatgaatgattttgtttccatgccgaatgatgaaatcaatcgttacatgaaaatggaaaagttactggaaaataaaatctcccgtcgctttaaggtgcgtcgcttggaaatccatgattttgggtatctcatggaacatctttacggcagggacggtatcgcttatgaagattatgagtatcagttaccaaagaagaaattgaggagagaaacgcagataaaatactacgaccttatccgtccgacaagatgtgtgattgaggaaagccaaaggtatttacgattggaacatgaggacaaggaaagctatgtgtcctactttaccgtcaatgcgattgtcggcgagcttgactttccgtcgtctgaaatcttctatttccagcaacagcaattcacattccccgttgatacttctatgaatgtagaaatcgtggaaaatcgaaaagcattaaccacagtccgcaacaagaaaaaggaattgaaagaccttgacaatcacgcctatcaagctggaagtgaaaccagctcaaatgtggtggacgcattagacagcgtggatgagctggaaacggacttagaccagacaaaagaaagtatgtataagctctcttatgtagtgcgtgtatcggctgatgatttggacgaattaaaacgccgttgtgatgaagtcaaggacttttacgacgacctcaatgtaaagctggtgcgtcctgctggggatatgctggggcttcattctgaatttttacctgccagcaagcgatatatcaatgattatgtgcagtatgtaaaatcagattttttagctgggcttggctttggtgcgacacagcagttaggagaaactacgggtatctatatgggctattccgttgatacgggaagaaatgtgtacctgcaaccgtcccttgccagtcaaggtataaaaggtacagttaccaacgcccttgcgtctgcttttgtcggttcgcttggcggtggaaagtcgttctgtaacaatcttctggtgtattattcggttctctttgggggacaggcggttatcttagacccaaaatcagagcgtggcaactggaaggaaacacttccagaaatcgcacatgaaatcaatatcgtaaacttaaccagcgataaaggaaatgcaggacttcttgacccattcgtgattatgaagaatgtaaaagacgctgaaagtctggcaatcgacatcttaacattccttacgggtatttcctctagggacggcgaaaaattccccgtacttcgtaaagcggtacgctccgttacccagagcaacagtcggggcttgctccatgtgatagacgagctacgccgtgaagatacgcccatatcaagaaatatcgcagaccatatcgacagcttcacggactacgactttgcacatctgctgttttcagacgggacggtagaaaatgctatcagtctggataaccagctcaacatcattcaagtagctgaccttgtactgccagataaagataccacttttgaggaatacacgaccattgaattattatcggtttctatgctgattgtgattagtacctttgcccttgattttatccattcggacagaagtatttttaagattgtagaccttgacgaagcgtgggcgttcttaaatgtggcacaaggagaaacgctctctaacaagctggttcgtgctggacgagctatgcaggcaggcgtttattttgttacccagtctgcctatgatgtttcaaaggaaagtctgaaaaacaatatcggcttgaagtttgcctttcgttctactgacattaacgagataaaacagaccttagagttttttggtatcgacaaggacgacgagaacaaccagaaacgcttgcgtgatttagagaacggacaatgcttattgcaggacttatacggacgtgtcggtgtggtgcagatacaccccgtctttgaagaactgctacacgcctttgataccagaccgcccgtacagagaaatgaggtggagtgatgaaagaaaggataaaaggtgcgttcacaaaaaagaagattttccactttctcaaaatggttctgttcgtggtggcactctcccttatcctgctttcacttctggggacggtggctcatgcgacggggcttgtggacgataccataaatgcagaaaatctttactcaaaatatccgctgtcgaattaccagcttgatttttatgtggataatagctggtcgtggcttccgtggaactggctggacggtatcggaaaatccgtacagtatggcttatactgcattaccaattttatctggacgataagcctgtatctaagcaatgctacgggctatgtggtgcaggaagcctataagctggacttcatcaatgatatggcagacagtatcggaaaaagcatacagacccttgcaggcgtaacacagaacggtttttccagttctggcttttatgtcggtttcctgcttctcattatcttagtggtgggactttatgttgcttatacgggactgataaaacgggaaaccagcaaggcacttcacgctgttatcaactttgtggtggtgttcgtgctgtccgcttcctttattgcctacgctcccgactatatcaagaagataaatgaattttcatcagacatcagtaccgcttctttggacttgggaacaaaaatcatgctccccaactctgacagcgagggcaaggacagcgtggacttgatacgggacagcttattttctattcaagtggaacagccgtggttactcttacaattcgggaacagcaacgcagaagaaatcggggcagaccgtgtggaagctctggtatcagtaagtccagaggacgaggacggaaagaccagagaggaagtcgtgaaaacagaaatcgaagataacgacaacaacaatctgacgataccgcaggtcgtgaaccgtttaggcatggtgttcttcctactgttcttcaatttagggataacgatatttgtattcttgcttacgggcatgatgttatttagccagatactttttattatctttgcaatgtttttacctatcagctttttactttccatgataccgagctatgaaagcatggcgaagcaggcaatcgtaagggtgtttaataccataatgacacgggcaggaataacgctcattgtaacggtggcgttcagcatttccagtatgttttataacatctccacggactatccgttctttatggtagcgttcttgcagatagtatgtttcgctggtatttatatgaagctgggcgatttaatgagtatgttctctttgaacgctggcgacagtcaaaacatgggacgcaggatattccgcagaccatatctgtttatgcgacatagagctaggcgtatggaaagacggcttgctggtgcggttactgctggcggtgttgctggtgcggtggcaggtagaacgatttcaaacagaaaaccgacaaggaacacagccacaaaagacagtcggggcaatacatctacttccagtatgggacagcgtgcaggctcaaaggtgggtgctgtcttagatacgaaaaataaagtgaaagacaaggcaaatgctgtcaaagagaatatcaaggatatgccgacacagaccgcttatgcggtgtattccgcaaaggaaaaggcaaagtccagcgtgtccgactttaagcgtggcatggtgcaggaacagcagtccagacagacgggacgtttggaaaagcaggaacagcatagacagaatatcgctgacaaacgtatggagcttcaaaaggcacaagaagcaaggcaggcacagcgaaagacggacggatcagcgacaacgggagctacccgtccccatgagcgaccagccacagcttcaaccattccaaagccgagtgcggaaaaaatgcaggaagtgaaacgccctgccacagcgaccacttcaaaagcaagtgagccagtcaagacaaatgttatcaaagagcgtccgctatcttctggtgcttctgatagaaaagcgacccagcctgcacagccagtacatagtttatcacaacagcagaatgtagaaaaagtggtatcgcaggaaacacaccagaatgacaccaaagaccgcaggataaaggttcagcaaacacaaaccgtccagaagaaccaacagaccatagagaaaacccgtaaccttgtaacgaagaaaggacagaagaaaaaatgaaactgaaacatatcgctcttatcggcagtctgtttcctatcctcttttctctggtgcttttctttggggtgctgattagtgcggacagcgacgatgagaacagcaacttttcttctggcattacgggtatgaacttatccgcagaagtcttgaaacatcagcctatggtggaaaagtacgccagagaaaacggtatctccgagtatgtcaatgtgctacttgctatcattcaagtagaaagtggcggtacggcagaagatgttatgcagagttcggaaagtctgggtttaccgcccaactctttagatacggaaaactcaatcaagcaggggtgtaagtattttgcgtccctgctttcttcctgcaaaaatcaaggtatcgacgacttgaatgtagcaatacagtcttataactatggcggtggctatgtgggatatgtggcaggaaaaggaaaaaaacacacttttaatcttgcagagagcttcgcccgtgagaaatcgggtggaaagaaagtaacctacaccaacccgatagccgttgctaagaatgggggctggcggtatggctatggaaatatgttctatgtggaagtagtcaatcagtatttagcagttccgcagatatcgggagaactggcacaaaaggtaatgaatgaagcgttgaaatatcaaggctggaagtatgtgtatggtggcagtaacccgaatacttcctttgattgttcgggattgacgcaatggtgctatggaaaagctggtatctccttaccgagaacagcacaagcacagtatgacgcaacccaacatctgccactctcgcaggcaaaagcaggcgatttggtgtttttccattccacctataacgctggttcgtatgtaacacacgtcggtattcttgtttcgccgacacagatgtaccacgcaggcgacccgataggatatgcagacctaagtagtagttactggcaacagcacttaatcggtgcaggacgagtaaaacaatagaaaggacttgaaaaatatgtttaagaagaataagaaacagacagaaactatcaaagaaccaaaagaaaaaaaggtgcgtactgtcaaggtaggcacacataagaaaaccgtgattgcgttgtgggtggtgcttgtcgcaagcgtgagctttggggtgtataagaattttacggctatcgaccagcacaccacccatgaaaaagaaatcattgaacttcgcttgcaggacaccaacgggatagaaaatttcgtgaaaaactttgcgaagtcctattacacatgggataacagcaaagaagctatcgaagcaaggacgcaggcaatcagcggttatctgacaaaggaattgcaggacttaaatgtagacaccattagaaccgatataccgaccagctccacggttacagatgtgattgtatggcatatcgagcaatcgggagcggacactttttctgctacctacgaagtagatcagcagataaaagagggagaacagacaagcaatgtgaaagcaacctatactgtaaaagtctatgtggacgcagacggggatatggtaatcgttcaaaaccctacccttgcaccagcagttgaaaaatcagactatgagcctaagacaccagaagcagacgcaagcgtggacgctgatacggtaaatgacgctaccgcttttctggaaacattctttaagctgtacccaacagcgacggaaaaagagcttgcttactatgtattgggaaatgtgattgaacctatcggcagggactacctttattctgaactggtaaaccctatctttataaaggacggcgacaatgtgaaagtcaaggttgcggtaaaattcattgataatcagacaaaagcgacgcaggtatcgcagtatgagcttgtgctacataaggatagtaactggaagattgtaggataaatgatatagcgtgcatttcctatcagatttgcacgcttttacaaaacgacaagaaaactgtgcaaaaatattgacttgtaatgaccgaatgctataatataaataacaagtgtacttggtattatttgaaaggagcgttatataatggataaagaaaaaatactatcacaaaacaaaaaagagaatctatatcttgatgaatacgaaaaacatattaaacttcaagggaaatcttttggcttaatgtttgttttatttatctgcattttaattcttttcattaaagcagtttgtaaagaaccttactatgacataatgacaattattgggtctgtggcatttggctctatgggttatgaagcacatatttcaaaaaataaatccaaatttgttattgctttattctttcttctatttatggggtattacttttataaatttttaatggtaggtttatagaatggacgaacatttaattttgagaaacagattaaaaactgtacgaaaagaaaaaaaattatcacaaacagaattagctgaactagtcggggtttctcggaatacaattagttctattgaaactggacaatttaatccaacagcaaaattggcattagtgctttgtatagctttagataaaaaatttgaagaattattttattttgattaaaggagagaacgattatggaattagaggaattgattgttgaaatagttataggattgtttttactttttacatcttatcaaataggtataaaagagaatattactttattacatggttatcattatacacaacttgaccctaaagataaaaaggtgtttacaaaaaaaataggaataggcactttactggttagtattggtattcttgttatgccgattatcaatttaatctctcattctgaattaggctattacataggtcttattttgattgttgtaggagtgttttatatcatattcatcattgtaaaatacaatggaaaacttattagctttaaaaagtagaattgaggtatgaatatgataggactgaacaaaagagatataaaaaaggcattgaaagctggtgcaaaagctggcggtgtatcattggctgatgttcgggcggatattgaagctacgattgatgaagctatgaatagcaccgacccagaggtgcaggcaaatttcaaaaagtattttgggaataaacgccctacgccagaggaatacatttataccattacgaaaaagacaacggtaaaattataataaaagggtcgtggaaatgcttcacagaattgtgatctgcattatcacggctcttttactctctgtttactttcaaaactgtaagtgtaattgaatactgcccttgctataatttaattgtattccaaaacaaataaatgtggcaggaagaaaggagcgatttttaatggaacacattttaaatttagagcaagtaaaaaaatactacgggggtaactctggaaatatcacaaaggcagtagacggtatttctatgtatgtagataagggcgaatttgtcgcaatcatgggagctagtggttctggaaagactaccctattaaactgtatctctacgattgatactgtaaccagcggacacattacagtcaataatcaagatattaccaaaatcaaggataaagattttgctgatttcagacgtgaaaatttagggttcatttttcaagatttcaaccttttagatactttaacgattggagaaaacatttctttatcattggttatcaacaaacagaaccctactgatattgagaaaagagttcatgctatcgccgataaattgggtattcgtgatattttatcgaaatttccttatgaagtttctggcggacaaaaacagcgttgtgcttgtgctagagccttaatcaatgaaccgaaactgattttagctgatgaaccgacgggagctttggactcaaaagcttccagattattactggaaacaatgtctgaaatcaacaagaaaatgcaggctactattttaatggtaacacatgacccgtttagtgcgtctttctgtgaacgtattttgttcttgaaagacggtaaaatattcaatgaaattttcagaggggaaaaaagcagaaaagatttcttcaatgaaatactggatatattaaccttgctcggaggtgaagtgggaaatgttaggtaagttagcgtatagaaatacaaaaagaaatattaaagattatttgatttatctgataaccgttactacatccttttctcttatatttgcttttaatttggtggcaagttctgatgaaattgtaaagttatgttccagtatggatgcatttaagaattcattgttcgctgtaaatatccttattacttttgtgatatgctttttgatcaactatacaacgaaatttatgtttgaaaaaagaagtaaagaattaggaacatatatgcttcttggcattaagaaaaaagaaattgcccacttagttataattgaaaatatactgttgggaattttagcatttgtattagctattcctattggctttttattcagccagtttgtgtcgttagtaattgtaaacttactgggtattccaaaaactctctttatttctttgaattttgtttctattggactattgataatttattttttaactatttatgttttggttttacttaatctattaagaagaataagtaaaatgacgatacgtgattttctttactttgataaacaaaatgaaaagaaaatgttccgtgacagtaaaaaaagaaatgtcatttttgttttaagtattattcttggtgcgatttctctttttctctggaattcacgttgtactatggataattttaataagcaagaaacacttacctatttgatggtaagcgtaatcatgttgattatcagcatttatggtatatctacaacttgtgcagatatgttcttgactgttttgttaaagaataaaaaaatgaaatatcaaaatgataatctgtttgtagcaagaacatttgcttctaaagcaagaacaatgagcttcacatttggtacattgtctatgttgattttaatttcactgctggctctgaattattctagtatcaacaaagcttcgtatgatatcagcgtgaatttaaatgcaccatatgatgtacaactctttgatgataagcaggtatttgatgaatatattcgagtaattgaagaagaatatacgattgataataccattgagtacgacatttataaagagccgaatcatcaggtacaaaattttttccaatcagaatattatgattttgacccagtcttgaagttaagtgattataatagattactagaattaagaaagatgccgttgctttctttaaatgataacgaatactatatagttacaaatagcaagtttgcatatgaggttgaagataacaaagatattgaaaccataacagtagcaaataaaaatttgaaattaaaaggatatgacactaagtcttattggaactctataactaatactggcagatttgttgttgtacttccagataaatatgttcaaggacttgaagtatcagaaaatcatttgattatagatacaaaagaagatacagacgcagaattagaaaataagataaaagaagctatgcaacatcaattagtaaaggttgatgaaaatggagaaataaatgacgaatcgtatagagtaaacgtaagaggtgcagaaatagaacaacaaaaagcaatggttgcaatagtagtcagtctgtttatgtatattgcatttatcttgatttccgcagtagggacaattttggcagttcaatcattgagcgactctactaaatacaaatatcgctacctgaccttgcgaagattaggaataaatgacaagtcgctatttaagacaatcagaaaacaattattgatattattttgtgtccctgcaatatcagcaatattatgttctttcgtgatgatgtcgtcattgaataatgtgtatcaacaaattttgggagataaacacctttatctaatgtactttggcttgaatttaattatcttcttcctaatttatagtatttactggatagcaacgtatatcggtttcaaacgaaatatcaatgaggcgagttagatttttctagctctcctgctgtggaattattataatggtaaatcaagggggtgttgaaatgagaatagcaattatcgaagatgatgaaatcactcgtttggagctttctaaattattgaacacacaaggatatgaaacagttttattgactgactttggaaacctgacagatgaattaaagcaatattccatagaactggttctgcttgatattaacctgccgtatgagaatggctatgaagtatgcaggaaaataaaacaagtcatgccagtaccgattatctttgtaacaagcagagatacaaatgctgacgaattgaaaagtattcaagtgggtgggattgattttatcacaaagccatatgatacgcttattcttcttgagaagatcaagcgtgcattgcagttgtcaaacccaaacaatttccgtgagcttgtcaaaaaagattgtacccttgatttacacttatccattttgaaatatcaagagcaaagcattgaactgacaagaaatgaatttcgtattttgtactacttctttatgaacgaagataaagttattagcaaagaagaactattggaaaagctgtggaacgacaaatattatttagacgaaaatgtattactggttaatatgactcgtctaaaaaagaaaatgaaagaaatcggtattgttcatttattggaaaatatacgaggaaagggttggaaactgtgagtttttttacattcttagaagaaaaaataacagagatattgtttcagcttttctttcttgccttagtagcatttctcttgattttctacggtgtagatatgctatttgttgtattgctggtaattctgttcatcagcatacaagggctttttcaatggtgtttgtatcggaagaaacgtaacgcttcacaacatattattgatttagtagatggactggaagaaacctattatattgcagacgttttaccaaagccaaaagaatttcaaaatgaagcctattactacgcactaaaaaaagcctgcaaatctatgaatgatgaaatcggcaaaatcacagaagaaaagcaggactatcaagaatatgtggaaagtttcgcccatgaaataaaaataccgataggagcattgtctttgacgtttgacaatacaaaaaattacacattaaaaaaagaaacagacaaaatatttcagttagtggaacaaatgctctactatgcaagaagcgaaaatacggaaaaagactattttgtaaaacagttgcagttagacgaagtgatacataatgtcattctgaaattccgtcattcgcttatggaaagaaaaacaattatcaatatccatgacatagaaaatgtcatttatactgatgaaaaatggctgacattcattctatctcaaatcgtgcaaaatgcgattaagtattttgataagcaagaaaataaactgacgatatacagtcaagacaatggtacaaatatattgcttgtgattgaagataatggttgtggaataaaagcgtctgatttatcccgtgtatttgaaaaaggttttacgggttcaaatagaaacaaggcaaatgcaacgggtatgggactgtatctatcgaaaaaattatgcgataggttgggcttgaaattggatattgcttctacggaaaaagaatatacaagactgaccattacatttccaaaaggaatagttcataatttttcagagtaatttgaaaaccatgccaacattgatacggtgctttaagggggcttgcattatggaaaactttaagtacaattatttgcaatcaaattccacctaatagcacactattaaaaattgaatatgttttagctttaaaggctcgtacagactatatgttttgtgcgggcttttttcatacccgaaaaaaatttaaaaatttttcaaaagaggtcattaaatcacacctttcattccctatatggtgcggaaagagggataaacacttttcaaatcatagtggaaagggggtgagattgatgaaaccgtctgacttccagaaaacagttcaatgtcgctttgaaagttgtttgaagaaagttgtccgtcatgttgtaaaggactaccaacaaggattgaaacgacgaaaagataaagaaattccattctgtgaacttccagaaattttcgttgaaaattttgctgtgagggacgactacgaaacagattatacaatcttttcagtatgtggcattgatattcgtgtccttgatgatgagctggcagaagccttgaaaaaacttccagaaagaaagagaaatactctgttaatgtattacttcttggaaatgacagaaagtgaaattgccaacttacaaaagattacgcaaagcggtgtatttagaaaccgacatcatgctttggaaactatgaaaaaaatactaaaggagaagcagtaaaatgaagcaaacatttaagaagccgtcctactatttgctttcgcaagcaatggacggggacgaaaaagcgattgaaaaaatactggcattttatgacccgtacatatcaaagtgctgtttgcgtccactctatgatgaatacggcaatgtctatattgttgtagatatggagttaaagggacttatccgagaagcacttatcaaaatgattttagggtttgatattgccttagaaatcgaagaagaataagcagtttttagcagagcatggtttaatgtccccctctttcctgctctgccctgcttttacatgaaagcaacacgctttcgccacagctctttgacaactgaataaagcagacagatacgtttgtgagatagcgagccacggggactgtacgccacgacctttccaaaagaaagcgagcgacccacgcagtgatccgagagcgactgttggaaaagtcgttttgccatgacctatcctcacagaataatgatacgtccgcatggtgcggttctgcccacaagaatgggaatagttgagatactaatggagctttccaaagccgtctgtctgcttatgtaacttataaatagacacacagtaaagggggtgttacattatgttaaatactgatgtgttaaatgatgtgatgttccagcgaggtaaggtgttggaatatgaataaaacgaagataagagcaacggaacagccgattgctgttgatatagagggactgtctgctatgttatcttgtggtcgtgctactgcaagaaagattggcgagcaggcaggagcaaaaattgtgataggtcgcagggttctttattccatagaaaaagtcaagaaatacttgttatatttggaagaatagagcgattttctatttatgttctctggcgtgtgtagtataataagaaaggacaaagcatgctgtgagaacaagaaaagaggctttttcagaaaggaatggttctcatggcaattagtagaaaagacccaaaaggaagaaaattaagagagggcgaaaactggcgtaatgatggaagatacagttatcgttatacagatgtaagaacaggcaagagattgacagtctatgcacaagatttaccagagcttcgagaaaaagagaagcagattgcaaaagatatggaagataacatattgacagacggagcaatcaaaaaaatgacgctcaacacgttatttgagcgttatatggaaactcgtgagctggctgatactacaagagttagttatgttcgtgcttgggaaaacagagtaaaagacgagattggaaatattaaagttgttcagcttttaccctcacatattaaagcgtattatgcgaaactttccaaagctggatatgcttattctacaatcaagtatattcacaacctgctttatcctgcattagaaatggctgttgatgatgatattatccgaaagaaccctgcaaaaagttccattagtgattatggaaaaacagcagaggaaaaagaagccttaacagtttctcaacaagaaaagtttatggagtttgtaaaacagagcaatgtctataacacatattatcctatgtttaccataatgattggtacggggttaaggtgtggggagcttattggtcttacatggaaagatataaacatcaaggcaaaaacggttaatgtagaccaccagctcatttataagaatttaggcgacggttgcaagttccatatctctacaccaaaaacggagtcgggtattcgtattatacctatgacacaagaagttgcaaaagcctttgaggaacaaaggaaaatcaattttatgcttgcaaaggataagagcattgaggtggacgggtattcggggtttgtctttacagcaaaatcgggcagaccgcttatgccgaatggcgtaaatagtgttttatacaacattgtagacgcatataacaaaaccgaagtagagagagcaaaaaaagagcataggaaagcagagctgttaccaaagttttcagctcatgtaatgcgtcacacagcttgtaccagaatggcagagtgccgtatggatgtaaaagttcttcaatatattatgggacacgctcatatagatgtaacaatggaagtgtataaccatattggagagctgacaaggattgaaaatgagattgcaagactagatagtatggtgttaaatgcttgacaccacaaaaagagaaattggtgtcaaattggtgtcaaaacagaaaaaatcacaatttcaaaagaaataagatactgcaaaccattgattttaaagggtttgcaaaaaaaatctcaaaaaattagcactcacctcttgacctggctaaaaactatgtgctatataataagtagaacaaaggaagacagagaaaaagaaaagaaatgaacttctgaatcctccgaatgttctgacaacaactgcgaaagcagcttatataaattgtgagatcttctcacaaaaggcaacaaagttagttagcattgaaaggagaaatgacttatgatgatgcctagtatttttggagaaaacttatttgatgatgattggatgaacttcccgtttgagcaggacttctggggaaagaagaatccgttatacggtaaacacgctaagaacttgatgaagacagatatccgtgaacatgacgcaggatatgaagtagatatcgatcttccaggattcaagaaagatgagatcagcatagagcttgagaatggttatttgactgtatcagctgctaagggtcttgataaggatgaggaagataagaaaggcaaatacatccgtaaggagcgttatgccggagcaatgcagagaagcttctatgtaggtgagaaccttacacaggaagatatcaaagcaaaatatgagaatggtattctgagactgtcagtgccgaagaaagaggcaaaaccagttgagacaaagaaaacaatcgcaattgaaggatgatttgaacactgatgtgagtcaggtgtcaaatgtcgaaggggcttatgtaagccccttctttttgtgcgtaaatctatttatacgtgtataaaacataattcttcagtacaaaaacgttcataaattcggtcgtaaatatttacgattgtttttatgaacgtttttgtatataatagaatcaataggactggaaaggatgtgggtgatatgcgtgaaacacgaacattagaattcaaggaaacgattacaaatacttttttgaaaacagtaagtgccttttcgaattatgatggaggaaccattgtctttgggattgatgacgatggaaagatcaaagggttagcagatgctaagcaatcgtgtctggatattgaaaataaaataaacgacagcatttctccacaaccgaattatacacttgagatacagaataatgatcagacaataaaacttactgtaaaaagtggacttcaaaagccgtatttatacaaatcaaaagcatacaaacgaaatgatacagcaacgatagaagtcgatacactagaattttcaagacttattttagaaggtcaaaatattagatttgaagaactgccatgtaaagaccaggagttatcttttgaagtgttgcatcgcaaattatcagaatgcattcagattgaaaattttagcaaggatactttgaagacattgaacttatatgataacgacaatggttataataatgcagcagggcttttagcagataaaaatcattttccgggaattgatatggtgaaattcggtgaaaatatcagtatcattcaaaaaagatcaacatttgaaaacaggtctgtattagaagaatatgataagtcagtagatgtgtttagagattattatcaatatgaagtaattcaggggattgacaggaaaaaggtcgagaagattccggaagctgcatttagagaggcgattgcgaatgcattaatccaccgggcatgggatgttgaagcacagattagagtattgatgtttgatgatagaattgaagttatttctcctggtggtttgccatcgggaataacaagggaagaatatttgtctggtaaactttctgtattaagaaacaggaatcttgccaatgtattttatcgtttaggttttgttgagatatttggaacagggatcacacgaataaaacaattgtatgaagaaggattgatgaaaccggaatttgaagtatcagagaatacgattaagattgtacttccattatttgaaaagaacatgaatctttcagaggatgaaaagataatttatcggcttcttagccgaacaatgctgaaaccagtgagtgaaatcataccatatgtaccatttggtaaatcaaagacaacaaagctattgaaagagatggaacaaaaaggtgttatagatatccatggaaaaggtagaggtacgaaatatataataagataaatatgaatcataaacgcacaaaaaatcagccgtaaatatttacgactgattttttgactttataatacatttataatttattcggtttccgctttgattccctggtcgaagatttcaacagcttttttatttggctcagcagtaagctttgctacaataacagcaatcagaagacttgcaaagaatccagggacaatctcgaagatacctgtggcatctgtcattcctgtgagcagccatccgagatctacaacgaatccggagattacacctgctacagcgccctggtagttaaagcgtttccagaacagagacagcagaatcgtaggtccgaaagaagcaccgaaagcgccccatgcattttcaaccatatccatgatagcctgagcaccgcttcccttggagtttgcgataccaaaagcaatcagggagaggatcagtacgaggatacgtccaaccatcagcgtctctttttcagaagcattttttctgaagaaaggcttgtacagatctgctgtgaaggagctggatgctaccaacagctgggaatctgcagtggaaatcgaagcggcgataatcgctgcaagcagaagtccacagatgcctgccgggaagaatcttcgcgccatagcaatgaatacaagtttctgatttccctgagtgagcagttcagcgcccataaccattctgcctaagtaagcaatcaggacagcagagaacagtgagataattacccatacaattgctacgatagaagatttcttgatcatggatggtttctcgatagacataaaacgcaccaggatatgtggcataccgaagtatcctaatccccatccaagtccgctgacgatatcctgccagctggcatcaaagataccgcctccgaaagcacactgtgttacagcgcctgtagcagcatcagtatactcatatactgtagtaagagcagcaggatccaacagatcactgtgaccgatgcagactacgagaggtacaagcatcagtgcaagcatcatcagtaatccctggaaaaagtctgtccagcaaactgctgtaaagccaccaaagaatgtgtaggcaacaatgatcagcaagaatgcgaacatagcaatcttaggagaaactgtcgggaacagtgttgtgaatacagaagtaccggctaccagtgcagatgctacataaattgtataagcaaacaggaagatcagtgcacaagtcaactgcagtgatctggagtctgttgcaaaacgatttgtcagatactgtggtaatgtgattgcatcatctgcagctttagagaatgtacgcagacgttttgcgcacagaatccagttagcagctgttcctaatgcaagaccgataccgatccacatctgtccgaaaccgaaagctaagatcgatcccggaagtcccatcagcagccacgcagacatatcggacgcctgtgcggacagtgctgttacccaaggtcccatagatcttccaccaaggaagaagtcctcggagttcttattggtaccgttaaagtaaaatactaacgctacgccaagcaaaatgacgaaatacgcaataaaagtaatgatttcccaattcatattcttttatcctttccttatattattttatatgatgatatcgggcaggattgtaagaaggcatagcatttgtacaatccataggtatcaaaatcataattgaaggcatttttaacccacaataacatttaatttaccgcaattaggcggatattgtcaatagtttgggggaaactactattgtttcaggtgtttcttatagttctgcggttagtagaaacggacagagattttttcataaattatgaaatattgatggaatctcaccttgtattgtgagataatagaaaagtaagagttctattgctgctcgtaggtaactgcgaacagtaatagatccgtatctgttcagtatcttcacagataccagtattctaaaaagtagaaaacgaggtagaacaacatgaaactgatcaaggagaagaagatttatactgggaacggtgtaatcgaaaatggctatatccgctttgatgagaagattgaagaagtcggtgatatggcggggttcgagccgaaagaaggggatcttgaggtaagttgtgcaggaacaatggttgttcctggatttattgacattcatagtcatggtggttatgggaaagataacatggatgctacaccggatgagattgatgagatggttaagcagatgacaaagcaggagggaatcacaacttatttctgtacaactatgactcagacatatgagaacatcgagaaagcgatgcagaatattcatgatgcggcacagaagaacccggtgatcaaaggaatccacgtagagggaccatttatctcaactgtgtttaagggagcacaagatccttcttatattaagaaaccggatgaaaaaacactggcaaaatggaacgagatcagcggcggtctcctgcgtattgttacttatgcgccggaagaggctgatccgtcatttgagacatggtgcaaggaaaatggagttgtcttaagcgcaggacattcgaatgcattatacggggaattgaatgcaagcggagcaacacatgtgactcatctttacaatgcacagagaggactgaatcacagagagcctggtgtgacaggatatggtatgttggcagaaggggtacatgcagagctaatctgtgacggaaagcatatcgtaccggatatggtgaaactcgcatgcaaagtaagagggtatgatggaatcgagctgatcacagattccatgcgtgcgaaaggaatgccggaaggaaagagcgaactgggcggacaggtcgtaatcgtaaaagatggtatggcaaaactggaagacggaacgatcgcaggaagtatccttacatacattcaggcatttaaaaatgttatggaatttacaggtgctacagttgaagatgcagtaaagatgacctctggaaatcaggcgaaagagttcggacttgattctaagggggctattgcagcaggaaaagatgcagacatggttgtattaaatgaggactttgatttagtacagacaatcagctatggtaaactcgcataaggaataagaagttataaaatatatctacagaagcaggaagcaaatagatttgatctatgaaaatatggggtggcttccaaagcactcgatataaatataatgaaatgagagggtattaaacatggaagtaattgtaaagaagaattatgaagagatgagcaaggcagcagcaacactgtttgcagcagagattatggagaatccgaaaacaatccttggtatggcaacaggatctacaccggttggtctgtacaaagagcttgttaaaatgtatgaggctggagatcttgatttctctcaggttactacatttaatcttgacgagtatattggactggcaccggagcatgatcagagctatcattatttcatgaatgacaatcttttcaatcatgtaaatatcaacaaagagaatgtacatgtaccggatggggttggatttgaagctggagaggcaggaaaagcttacgaagaactgatggcaaagacaggacaggtagaaatccagctgcttggacttggatgcaatggacatatcggattcaacgagccggcagatgagtttacaaaagtaacaggtgagatcgatctgacagacagtacaattgaagcgaataagcgtttctttgagaagaaagaagatgtgccgagaaaagctgtttctatgggaatcggaacaattatgcgtgcaaagaagatcgtacttcttgtaaacggagagaataaagcagagatcctgaaagaagtagtaaacggaccggttacaccaaaggtacctggaagtatcttacagttccatccacatgtaacagtgatctgtgatgaagaggcagcaaagtacctgtaaaatgcctgcaagaggtcatcaactgacatacggttaaagcttatagtagcttgtgtctagagagacttcttagtaaacgataagaaccatgaagaagctgccaacggcagcttcttctaatatataaaattcttgtaactattcagagccaacctccaaaatgctatgcatttcggaggtgtggcgtatccgccaaataaaatttcaaaaacagtctaaaaaatgcaagcattttacacctttttttgaaattttgcttggctctgaacagttacaaattcttaattattaaaggaaaatagaacatatgaaaacaataatattagaagcatgcacagattgtgtacagtcagcgatcaatgcgcagaaaggtggcgcagaccgaatcgaattatgcagcaatcttgtgatcggaggacttactccggggaaggcattatttgatcttgtcaagaaatatacagacatcaagacgagagttcttcttcgtccgagatatggagattattgctataaccaatatgaatttgaacagctaaaagaggaagttcagatgtactgtgagatgggagctgatggagttgtcatcggaatgctcaatccggatggtacattggatacagagcgaatggcagaacttatcaaggcagcaggaaataaagagaaagcgcttcaccgtgcatttgatgtctgtatagatccgatgaaagcgctcgaagaagcgattgatcttgggttcgatacgattctgacaagtggacagaaagaaactgcgtgggaaggaaaagagatgctgaaagcacttcaggagaaaagcgcaggaaggattgagatccttgcggcaagtgggattggtgcaaaatcaatagaaaagcttcttccatatactggaattacttcttatcatatgtctggaaaaatcgtagtggacagtgcgatggaatatagaaaagaaggaataggacttggattgtcagagcgtggagattatgcgctctggcagacttcggaagaagaaatcgtgaaagcagtaaaggttttaaaaacaacaggttaacttcaacagacgtgtcttgcacagcttgaaaaaaacagttatactcataggcaaaggcaaaaaatatatttataagacaagaaagttttaacaggagaaagcggattatgatcaaagtaatagcaagtgatatggatggaacactacttggagacaatcacaaagtagcaccggagacagtagaagcgatccgtgaagcacaggcggcgggaatccgctttatgatagcaaccggaagaagttataatggagcaatggaagaattaaaaggtctggatcttggctgtgatttcattgtgggttcaggcgcagagatacgcaacccaaagggtgaaattctaaaaagcataggatttacatatgaggtctgcaatgaggtggcaaaggtattggaagaatatccaatctcggtattgtattgcgccggaccttatgagtatcgtgtgggaacaccggaggaagtagaggagagtattgttcgtcagattcagctgttccatttatctgagtgcagagaccaaatagagcagtcagaactttataagcgagtgaaggcaagttcaagacgaatcgattctgtggacgaattagagaaacagggaattatgatccataagattttcctttttacaggcgatctggagatgcttgataagatcaagcgaagactgatgcagaatccggaactcgcagttgcgtcttccttctataataatctggaaatcacggtaaaaggagcggagaaaggacctgcgattcaggaatatattgaatctttaggttatacaaaagaggaagtgatggtgtttggagacagcctgaacgattactctatgttgtctatggattttggagcaactgtcgcgatggaaaatgcagatgaggaagtgaagcgggtttcaaaatatgttacaaagtcaaatgaagacttaggggtggcatataccattcatgaactgttgaaaaagcaggggaaaatcaattcaaattgtgaataacttttcaaaaaatgaaaatgtatgttgacaacacaaaataaaagcgaggcaattaagatggatgtaagacagaaaagaaacaaagtacttggagaacgtgtagtgaaggcacttgaatccagaaatatggatgcttattatgctgaaacgaaggaagaagcagtaaagaaagcactggagtggattccggaaggaagcacgatcaatatgggaggtgcctcttccgtacatgaatgtggtctgatcgatgcgataaaatcaggaaattataatttctgtgacagagataaagcatctacaccggaagaaaaacaggaaatcgcgagagcagctttttcctgcgactggttcctcggaagtgtgaatgcgatgagtgaggacggtgtcttcattaatattgatggaaatgcaaaccgtgtggcagcatatgcatttggaccaaagaatgtacttctaatcgttggtatgaataaggttgtaaagacgcaggaagatgccatgagcagggcaagaaatgaagctgctccggtaaatgcacagcgttttggaattgatacaccatgttccaaggctggaagctgctttgactgtaagagtccggagtgtatctgttgtcagattctggtaacaagattcagccgtcagaaaggtcgtttcaaaattattcttgtagatgagaatcttggtttttagtagctggagaaggaaaaaagaatgggaagaaatagaaagaaaccggtgcgctgcagattagaaaagcgacagaaacgaagcaggcaaaagaaaaaaagtggtttatttgacaaagtaacgatggtgatcctggttgtggcagtctgtgtttttgcgttttcgctttatcagctggtacgcacaatggtgccatattattctggcggaaaagagtatgataagcttaaagataaagcaatcactgtacaggagcaaacagatgatccgggtgattcgggagatacgttcaaagtagactttgatgtgcttttgcaggagaatccggatacggtagcctggattcggtttgatgaaccatccatcatcagttatccggttgtaaaaagtgcagataacaaagagtatctgacaaagacgttttccgcaaatgataataaactgggtgcaattttcatggacatgaaaaataagagtgatttttcagatagaaatacaatgatttatggacataacctgaaagttggcggagaaatgttttcgcagctgaaagagtatgaggaagaatctttctataaagaacatccgaatttctatatttatacaccggatggaaaaacaaggacttataccgtgttttcagcagctgtcgtgaaggatactgcagatcagtataatctgacttatgcgacagacgaagcgtttgagagttatttgaaaatgtgtaaagaagattcagcatatgacacaggaacagaagtgaatgcgcagtctcagattgtcagtctttcaacttgtaccaatgtaaaagaagatgagagattccttttgcagggagtattgacggcgacagacggaggagaaaattagaatggcagacagatttgatgtaggcgacattattaagatgaagaaaccgcatccatgcggaagtcaggagtgggagattctccgggtcggagcggatttccgtctcaaatgtatgggctgcgggcaccagattatggtgccaagaaaattggtagaaaaaaatacaagacaaattacaaaaaaggcttgaaacaacaaattctttatggtattataaggaactgtgacatgctgatggaacaattccaatcagtcattcaatttccttgttcccgggaggaaccgggggccaagagaccataaggaggtaaaataagatgaataagtatgaattagctgttgttgtaagcgcaaaactcgaagacgaagcaagagcagaagtaatcgagaaagtgaaagcaatgatcactcgtttcggcggtaatgtaacagacgttgatgagtggggcaagagaagattcgcttacgagatccagaaaatgaaagaaggattttattacttcatccacttcgaggctgaaagtacagttccagctgaagtagagcagcgtatccgcattatggacaatgtactcagatatttatgcgtgaaacaggaagcataagcggaaagaggtatatatgaataaagtagttttagtaggacggttaacaagagacccagaagtgagatattcacagggagacaatgctacagcggttgcaagatatacacttgctgtagatcgcagattcagaagagacggtgagccgacagcggattttattccgtgtgttatattcggacgttccgcagagtttgctgagaagtatttccatcagggaatgcgtgtctctatttccggacgtatccagacaggaagctacacgaacaaagatggtgtgaaagtatacacaacagaagtgatcgtggaagagcaggagtttgcagagagcagagcagaggcagaagccaacagagcaagtttccagcgtcagtctgcaccgagtccggcacctagcgcagatgcaggtgatggcttcatgaatatcccggatggtatcgatgaggagttaccgtttaactaagtcggaaaggagataaccatcatggcttacgaaaaaggaagcagaccagagggtggattcaaaagaagaggcccagctcgtagaagaaaaaaagtttgcgtgttctgtggtaaagagaacaacgaaatcgattacaaggacgttgcaaaattaaaaaaatatgtttctgaaagaggaaaaattcttcctagaagaattacaggaaactgtgctaagcaccagagagctcttacagtagcaatcaagagagctagacacatttctcttatgccttacgttcaggactaattgagataattagctaataacaagatcgaatttttggagaaattcagaaattcgatctttttactttttctaactcatttttgcgtatttttttgcataatacaacctatagcatcttaggggaaaagatgctataatagattagctatattgtaattagtcacagatgatggtgattgatagtagtcccaggtgaggtattagttatgaaaaggaataaaatgcagctgaagggacagctcagaatgtacatgcgatggccgctgatcatgacacttctcttgattggcatggatgtatgggtgtacatggtggacaagaaagccggacttttgatgtcagtgatcataattatatatgtaggaatcgctttttcgctgtatttctataacagatctttgatcctggcagatctgatccagttttcagtacagtacaaaggtattgaaaaccggttgctcaaagaactggcaattccctatgcgattgcgctcgaagatgggaggattctgtggaagaatgattgctttttgaatctgacagaggggcagagaaaagaacgttatctgaaccgtatgattccagaattacatccgggtgtgtttccaaaaaatgatgtggatcatgtagaattggaagtaacttatcgtgaaagaagttatcaggcagagcttcgaaaagtatcattggagggattcagtgagaaagaagagttgcttcagattccggaagagcaggaatattttgttgcagtttctttaagagatgtaacagaactgaatgcctacatccgagagaacgaagatcagcgaatgattgccggattgatttatattgataactatgatgaagttatggagagtgttgaggaagtcagacaatcccttcttgtggcattgatcgaccgtaagatcaataagtatatcggagatgtagatggtatcgtaaagaaactggagaaggataaatactttatcgtacttcgaaaggatgcttataaaaagctgaaagaagacaagttttctcttctggaagaggtaaaacaggttaatatcggtaattcaagatcagcaacactgagtattggtttgggattgaatacggcaacgtatgcgttgagctaccagtatgcgcgtgtggcaatcgatcttgcacttgccagaggcggagatcaggcagttattaaggattgtaacggaataacttattttggtggtaagaaggagcagacagcgaagaatacacgagtgaaggcgcgtgttaaggctgaggcacttcgagagtttattgtgaccagagacaaagttattgttatgggtcataagattgctgatccggattcttttggtgcatgtatgggtatttaccgtgctgcagtaagtctggagaaaaaggcacatattgtgatcaatgaagttacaggatctgttcgtccgttgtatgatgagattttggagagtcctgcatatgaggatgatatttttattacgtcagaacaggcattggattatgtggatgacaatgcgatggtcattgtagtagatacgaacaagccacagatgacagagtgtccggaactcttgaagaaatcaaagatgattgcagtgctggatcatcacaggcagagtagtaatattattgagaacgcggtactttcttatgtggagccgtattcttcttccacttgcgagatgatcgcagaagttctacagtatatggtagatgacatcaaattcccggcacttgaagcagagtgcatgtatgccggaattatgatcgatacgagaaactttatgaaccgtacaggtgtgagaacctttgaagcagcagcatttttgagaagatgcggtgcagatattacacgggtacgcaagatgttccgtgatgatatggcatcttatcaggcaaaggctgaggcagtccgcaatgcagaagtttatcgtaaggagtatgcgattgcagtatgtccaagcgatattgacagtcctacagtgcttgcagcacaagcggcgaatgaattgctggatattagcggaataaaggcttcttttgtattgacagaatatgaaaataagatttatatgagtgcgcgttccattgatgaagtgaatgttcagattatcgcggagaagctcggtggaggcggtcatattaattctgcgggagcacagtttgaccacacgaatatgcatgaagcagtcagtgcattgaaagagaccattgataaaatgatagaagaaggagatatttgacaatgaaagttattttattacaggatgtaaaatctcttggaaaaaaaggagagatcgtaaacgtaaatgatggatatgcaagaaactttatccttccaaagaagcttggactggaagcaacaggaaagaatctgaatgatctgaagcttcagaagaataacgagaaaaaagttgcggaggagaacctggaggcagcgaaagaacttgcagctaagatcgcagaagctaaaattgtaacacacatcaaagttggagaaggcggaagaacttttggttctgtatcaagcaaagagattgcagaggaagtaaaagcacagttgaatcttaatgttgataaaaagaagatccagttaaaagaagcgatcaagacactcggaacacacaacgtgtctgtaaagcttcatccacaggttacagcagaactgaaagtagttgtacaggaagaagcataaggagacgaaatctttatggatatggaagcagcaatgaaacgaattcctccgcacagtgcggaggcagagcaggcagtgctcggtgcgatgctgatgaacaaggaggccatcacggtggcctccgagatattatcaggggatgatttttatcagacagcatatggaatcttgtttaattctatggtggaactgtttcatgcgggaaaaccggtcgatctgatcaccttgcaggaatatctgaaagaaaaggatgtcccgccagagatcagtagcatggagtttgcaagagatttgctgatgggaacacagacttctgcgaatatcaaaagctatgctgaaattgtacgtgaaaaatcaatcatgcgtcgcctgatcaaagtaaatgaagagacggcaaatgcctgttatctgcagaatcagccattagaggagattctggaagatgcacagaagcaggtttttgcacttgcagagactgggaattcagaagagtatgtaccgatcaagcaggttgtactcaatgcattggatgtaatcgagcgtgcgtctaagacaaaaggaacagtaacaggaattccgacaggattcattgatcttgattataagttgtccggtctgcagcgctcagaccttgtactgatcgcagcccgtccttctatgggtaagaccgcgtttgtattgaatatcgcacagcatgtggcatttcgtcagaataaagcagtagcaatcttcagtcttgagatgtccaaagagcagttggtaaaccgtctgttctcattggagtctcatgtagatgcacagatactaagaaccggtaatctgtcagatacggattgggagaagttgatcgaaggagccggaacaataggatcatcaagaatgatcattgatgatacgtcaggtattacgatttcagagatgcgctcaaagtgtagaaaatacaagctggagatgggacttgacctgatcattatcgactacttacagttgatgagcggaagcaattcaagaaagaatgagagccgtcagcaggagatttctgagatctcacgttctttgaaaggtcttgccagagaattgaatgtgccggtgcttgcactgtcacagctgagccgtgcggttgagcagagaacagataagcgtccgatgctttcagacctccgagagtccggagcaatcgagcaggatgccgatgtctgtatgtttatctatcgtgatgattattataatcctgacacggaagataagaacattgcagaaattattatcgcaaaacaaagaaacggcccgatcggtacagtgcgtcttgcgtggatgccacagtacactcgttttggaaacgagctgcgtcagcaggatcaggagatataaaaaagaaaaggacaggcacttgttggagagcgcctgtcttttttcgatatacaaatccaataaatctaccggtatgtgcagtgtgcaattagaaatcgcagaaatgctatgtaaatctctttttgaatctcagtaccggactatttttcacactttctcttcgggttgcctgttgctggcgaatcaggctgtccagtttacggaaatgttcttcttcctgccgttctttcgcctggaaaagaaaatccatctcacgtatgacatctgcggtgacctgagtgctgatttctttttctaatgctttgttattttcagtaacgacttcagtcagcacttctccgatgagtgaacgtacatgttccagctgggtttctgtgatgacttcgaccggagcagcggtggtggccggtttgcactcagatgccagatcaggtgcaggtgttttggcaatggcattcttatccttgttttcagtgtgtctcattatctgacgtgtagatttcaattctgggatcaatggcttcagatcgcgaagcagaaccccttcattcttaagttttttaatacagcaaaagagctggatatcatcctgggtataatatcgatgtcccatctctgtgcggccgatcggaatatgaagttcctcttcccagtaccttaagacatgggattctacctgaactttcttggcggcttcagagatcataaatctgacttcacccattgattttctatcctcctgttagaatcattgcgattactgttctgatttcgctacatttattatagcatagagaaattatgaaagaagtgctaatcgttcgtcaaattatggcaaaaaatggtaattgaagaaaggtatggaatacaagagaaaaagttgtaaaaaaagaaatcctgccgcatctgaatcaatcagacgggcaggacttctgcgttttgtgatcacttagcgcttataaattatgcttcagagatagcgcctgtaggacaagcagcctcacaagctccgcaatctacacaagcatcagcatcgatctcatatttgccatctccttcagaaatagcgcctactggacattcgccttcgcaagtaccacagcttacacattcatcactaattacgtgtgccattgtatgtaccctccttttttggattacgataggtttttcccttttcgttatcctcattttaatacaagacggggaaatatacaagagttcctgatgtatttatttgagtaattcataagttagttttatagaacttgtgaacgtggaaaatagaagatttctatactaaattagtaaaaaaacgaaaattcacgagattttaagaaattatctcttccatttttcaaggattcgtgtatcataatggattgagagttaaaaagtagaaaacatagagataaaattgtgtaaatgaaaagaaggagaaagttatgcggaaacgaaatgtaagagcagcgattgcggcagcactttgtatgacggtacttgcagccggctgcggaaagaaggcagatgatccggtttttacaggggataagacagaagcaccgatatatcaggcgaatctggatgcaattaaatcttctgcatatgcatcggcagacaatctggatctggaacctggaacttatatttctgtaatcggaaggggatcttcaacaccatattggaatcaggtaaaggcaggggtagagcaggcagcaactgacttgaatacagcacttggctattccggaaatgataaggtgaaagtattatacagtgcaccggatgagaatgataatatcgatcagcaggtaaatattctggatgaagagcttgcacgttatccggatgtgatcgcaatttccagcgtagatgcaagcgcatgctccgtccagtttgatcttgcgattgagaatggaattccgatcgtagcatttgattcaggaaacagctatcaaaatatccaaagtacttgcaaaacgaataatatagaagcggcaacaacaggaacaaagaatttctgtgagaagatcggtgacagtggggagattctgttgcttgtgcatgatacagtatcagatacggcgaaagagcgtgaggcaggaatcaaaaatgaacttgcagcaaatcatccgaatgtgactgttacagagacaatttatctggatcagctggaaatgttgaagaaacagattgtggctgaacaggtcggggtaacaccagaagaactggcagccgcagaagcaggagaaaagaaggaagagacaacaggaacaggtgatgcttccgagacaattgcagatgcagcatcgaatgcggattcttcatcagcagacgaaagtgcgaatgagacagcacaggaagtggacaatgaattgtccgagaagatgcagcaggtcaacgatggcgcggcaaagatgagtgatgaagatgcaattcaatattatatggagaaacatcctgatttaaaaggatgtattgctacgaacgagacagtaacccagcttgcaattaagacgatggatcagcttgatgcagaaaaacatattacattagtggggtttgatgcaggaaaagagcaggtcaatgcattgaaagatggaaaggtggatggacttattgtgcagaatccttttggaatgggatatgcgacagtagttgcagcggcacgtacagttcttgagattggaaatgaagctgaggtcaacacaggatatgtgtgggtgacagcagacaatatgaatgacgatacgataacaccgttcctttacgaataagttgaaaataagtcgaacaatttcataaaggaaaagagcttgtcaggtaaaataaaaacatcaggttttatacttcattctgaaattcagaaatatagaagtaataaaatcctgatgttttttattttatattaggaaagtcctttcctaatataaaaaaaacgctccgctcaggatgcgcactgcggcgtacaaggtaggtgtcgcaagcgaccgccgcaggcgcaggaatgtgccaaggcacattctttgttctgttcacgttgtcctttaagctttgcttaaagaaaaaataaattcggtgccaaccccttctgtactgatcacattgatatgttcatcgtgagcctgtatgatttcttttacgatcgaaagtccaagtccggttcctttcttatcctttccacgggaaagatctgatttgtagaaacgctcccaaatcttattgatttcctttcttgaaattccgattccatgatcttttacagaaacaaagattttatcatttttcgttgttacttctactgtaatagaagagtcattctcactgaatttaatcgcattatccagaagattataaagaacctgttggattttgcgtcggtccgccattacattgatctgttcagatagtagaaagagcttaatggatatatgcttctgagtacagacaccctcgaaagactgggcagtatgtttgatcatctcctgaatatcaaaggaagtcttattgagcaggagctcttttgtatcaaattcgttcaaagtaagaagatccgttgtcaggtcagtcagtcgttccgtttcgaagagaatgatatttaagtatttctcatgaagctctggtgggattgttccgtctgccattgcttctacataccccctaattgaagtcaacggggaacggaaatcgtgagatacatttgctacgatctttttctgataatcatcagaatccttcagttgtgtagccatataattcagtgatgcggataaatatccgatctcatcatgcctgtttaccggaatctcgtaatccagattgcccatggcatattgcttcgcagcttctgtgatcagcaacaatggtcgatggacgaagaaatggaacccgagcaggaagatgaaggacaacaggaaaataactccaagagaaatataaaccggaaccatcagcgtgcggcatctttcgttgatcagagagaccgggctgtgaatgatcagatatccctttgtataaaatccctgtgtgacaggagccattacagtaatcatatcttcctgaaaataattatgataggttccgatcatgtactggttgctcccgatttcggccggatcaaaattattgacggattgtggcgcagtagtatccttcaggttggcagaggtgatcattgtaccatctttttcaacaaaccacagagaagaattaagatacgtcttcatagcagataactgagaatgaacagcccagctggaagattcgtttgaaaaataggaaggcagataattatctgcaatcatggttgcttctctgtataatgtctgcgaagtatctttttccagacgttcggtgatcagttctgtggttaatgttgctgttgtgaaaacacataaaaacccgaaaataatataaagtacaataaattttaaatgcagaactgctttcataatttctccctaagtactcatcggccaccagatgttgtttacagtatccaggaccgatgatttaaatctattttgtctcaaatttgtaaccaattccccatacagtactgatattccagtgagggtggtctttaatcttttcgcgcagacgtttaatatgaacatcaacggtacgagtgtctccgatatattcatagccccagatacggtctaagagctgctctcttgtgaatacctgattcggtgatgcagcaagacagtaaaggagttctaattcttttggcggcatatcaacaggatgtccgtcacacacaacagagtagtttgtaagattgatcgtcaatccgtcaaactccgcacattttgttttttcaacagaagtatcattctgttgtccaacctgatatcttctcaggacagctcttacgcgggcaaccatttccttagggtcaaatggcttcatgatataatcatccgctccgagttccagtccgagaactttgtcaaatacttcactttttgcagaaagcatgatgatcggtgtggcagctttggaacgaatctcacgacaaacctgatacccgtcaattcccggaagcatcagatcaagaaggatcagatttggttgatagctgtcaaaagctgcaagcgcatcttctccatcatatactaattttgtatcaaaacattcttttgtgagataaagagaaatcagttcagcgatattctcatcatcatctacgattaggattttctgttttccaaacattctttttcccccattaaccatgataaggtagttggtaactgtttaaaataattagccaagttctacaattgttacacctgcgtcaccttcaccaaattcggcaaggtgataggattttacatgtttctgacgacgcagatattcatgaattccctttctgagtgctccggttccctttccgtgaactacacggacagtattcaggtgagcgaggattgcgtcatccaggtatttatccagctcagcaacggcttcatcaacagtacgtccgagcagattgatctcaggccggacagaaagagattttcccattttgattttgccttttgaagtacggttcattttcttcggtgcatatggagagacttcctcgataatctccagatcagaaatgttgacctgggaactgaggattcccatacgtacggtaagattccctttggcatcaggtagagagcttacggttcctgtcaggttcatgctgagaactttgacagattctccgagcttgaagtcagatgctttatgctctttctttggtttctgtgctttcattgcagacgcagatgctgtatctttgatcttcttacgcagcttctcgcgttccttttccatctcggcagcagaaatgttttccttgccgaatttacggaaatccttgatcgtcttgtctgcaatttcttttgcttcacgcagaatggcgtttgctttttcatttgcctcgcgtaaaatgcggtcgcgctgatcatctaatttctcctggcgctgttttgcctgggctttcaggtcttccgcttctttcttcaatcgtgcgatttcttcctgttccttttcaatcgtccgtttgcttgtctcaagatcagtaagaagatcttcaaaggaaacgtcctgttcactgagccgtttctttgcatcttcaataatataatccggcagacctaatttcccggagattgcaaatgcattacttttaccaggaataccgatcagcagacggtaagtcggacgaagactttctatatcgaattcacaacaggcattctccacacccggagtggaaagagcatagacttttaactcgctgtagtgtgtggtagccattgtacggattcctctctggtgaagatgggacagaatagaaattgcaagtgcggcaccttccgtcggatctgtaccggctccaagttcatcaaagagaaccagcgaacgttcatctactttcttaaggaaagagacaatattggtcatatgagaagagaatgtactaaggctctgctcaatactctgttcatctccgatatctgcataaatctgatgaaatacagccagttcactgcggtctccggcaggaatgtgaagtccggactgtcccatcagacagaacaagccgaccgttttcaaagaaacagttttaccgccggtatttggtccggtgatgatcagcagtgtgaagtcttccccaagtgtcacggtgatcggaacaacctttttcggatcgagcagtgggtgacgtccctcacggacacggatgcgtccctcttcattcagaagcggccggctggcgcgcatggacattgccagagcacctcgtgcaaaaatgaagtcaagatccgtcagagaacggtaatccacacggatttcctcgatatattgtgcggcttcttcacttagattcgcaagaatcacctgaatctcttcctgttcctttgcataaagttcttttaagtcattgttcagttttacgattgccataggttcaataaaaagagtagaacctgttgaagactgatcgtgaatgagtccctgtacctgtccacgatattccgctttaacaggtacacaatagcggtctccacgcatggtaatgattgcatcctgcagataagtgcgaagggaaccgttgaccagtgtagttaaagtggcgtgtactttgtcattgatgttattaatgcttcgacgaatttgcttcagtgtggaactggcatcatcactgtattcatcttcgccgataatacagcggtcgatttcatttgaaagtggtgtcagtggttcaagcaggttaaaatattcatccaggcagtcgcaagcgtcctcttgtgtatcatgtcttccgtaggcctttaccctggctgcatttacaagcaggcgggaaatacggagaagttctgtgctgctgagtgagccaccaatctccagacgcttcatggactcttcaaccggtgcagcgtcaccaaacgagatacgtcctttttgcacgattcgtgtataagcggcagcagtctgttcctgataagtgttgatcttatgaaggtcggtcattggcttcaaacgacggcagagctgtcctccacggaaagatgtcgcttctttttcaagaagagcaatgatcttatcatattccagtttaaataatgttttttgattcatttattttcctctgtcatttcaacttaatactaattttttaatcatgtagctgttcacaatacatgtgaacaataactatttccgagtcttattgtaccttattatttcattaaataaaaggcttttatagatattgaacaatctatatgaatcagttatactaagtaatggaaatgtccgtgtcggttgattttgtagttgacacggaagtgaacagtcacgaatgaggttcatgccaatgtcagaaaagaaaagtaatggtcaggttccggaagagggtcctgatgggaaaaatttagaacagtcagagaaaaaggaatcttttgcatttctcgaagagacgataaaaccaaagaagatcagcaaacagcaaggaatgaaacagctcatccggattgcaatatgcggactggttttaggaggctctgcatgcctgggattctttgcattgcgcccgcttgcacagcatttatttcctgaaaagacacaagttgtgacaatccaggaggacaatcaatcagaggaagatttagcagaaggtggcgacacgacagagcagaatgacgtgcagaatcagcaggagatcagttatgtacagatgatgtccaaagcatatgagaaagcactgacagcgaagaagagtgtggtatctgttacgaaaggagcagaacaggagaactggaatgcagaagcgaccggaattgatgagagcgtatctggtgtgatcgttgcggataacggaccggagatactgattttgtcctatgcttcgatctgcgaagatgcaaaagagtggtgcgttacattttcagataaatcagaatataaggcaagcctgaaaaaaaaggataaaaatagtggatttgcaatatttgcggtagataaaaaaagcctttcagatgccacatggagtgcttcaagtgtagcatcacttggtaattcgaatctgacagaacagggtgatgttatattcgcactgggaaatattttcggttatgccggaggaagcggttacggaattgtcagttcgtcaaactataaagaaatcggacgcgacggagagtatagtgtgattgcgaccgatatgagcagtgcatccgaaggaacaggtattttattcaatctggatggagaagtgatcggaatgatttcttctgatatctggaaagaacgtggaatacgtactgcgaatgcttatgcgatctcagatctgaagttggttatccagctgttagcgaacggtgcaagtgtaccttatatcggtgtgtcaggaacagcagtgacaagtggaattcagaaagaagagggcatgccgtcaggagtctatgtgattgacgtggcagcagattcacctgcaatggcagcgggcatacagagtggagatgtgatctgttctgtgaatggagagaaaattgtaagcatgagtgcttaccgtaaactgatgctgacatggaaagtaggagatcagatcaaagtagaagggaaacgccgaggatctgaaggatatgtagatattaaatttgatgttacgattgaaagtaaagaataacaagtgaaagaggcagaaaatgagatttatagatggattatgcgagggagaaacaatcaggaatgtatatctttgtaaaggaaaacgttccgcagagacaagaaatggaaagccgtatgataatctgattcttcaggataaaacaggaacattagatggaaaagtatgggatccgaactcccagggaatcgcagattatgatgagaaggactttatcgaagtttttggagatgtgatcaattataatggaaatcttcagttgaacatccgtcagatcagaaaggcggaagagggagaatacaatccggcagattatatgccgacaacagataagagtgtagacggaatgtacgaggaactgacagcttatattcgtcagatctctaacaaatatttaagacaggtgttggaattctactatataaaagatgaagcatttatcaaaaaattcaaggcacattccgcagcgaagacagtacatcacggattttccggaggattgcttgagcatacactcagtgtaactcgtatgtgtgattattttgcaacaagctactctattttgaatagagatctgctccttagctctgcaatccttcatgatatcggaaaagtgaaagaactttctgattttccggacaatgattatacagatgagggacagctgatcggacatatcgtgatcggtgtcgagatgatcgatgatgcgatccgttctatcccggactttccggtgaagcttgctcatgaactcaagcattgtatcgtggcacatcacggtgaactggaatacggttctccaaagaaaccggcactggcagaggcagtggcactgaatatggcagattcaacagatgcaaagcttcagacattgacagaactgttcaaaggaaaaacaggaacagaatggcttggatataaccgtttgtttgagtctaatttaagaagagcatccgaggattaaatctaacaatgagaacaacaagtgtcactgtttgcagaatctatgtgagcagtggctatttgtatgatacaagggtcaaaaggtcatgcgtttcttgcttgcatgaaaaagcatgacttattgacccgcaaaacaccgaaaagtagccatttttcgtagaaaaatgagcggatttgaggtgttttaggattgcgagagcatgaaatgcgaagcaatccgtgtatcataggggtcaaaataccttttgaccccaacatctttgtataattaagagtaaaatagaagagagaaaagaatgaacaagaatgatattgtaacagttgaaataacagatatcggagtgagcggggaaggaattggccatgtggatggctacacgctctttatcaaagacgcagtgatcggtgatgtggttgaagcgaaagtcatgaaggcaaagaagaattatggctatgccagattgatgaaagtcatcacaccgtcagaatatcgcgtagaaccaaagtgtgcatttgccagaagatgcggaggctgccagatccaggaaatgtcttatgatcgtcagcttgtgtttaaagaccagaagattcgtggcaatctggaacgaatcggtgggttcacaaaagaccagatcgatacagtgatgcagccggttgttggaatggagcatccgtttggttatcgtaataaagcacagttcccgttcggaacggacaaagaaggcaatccgatcacgggattctatgccggaagaacacatgatatcattgcaaacacagattgcgctcttggcgtagagcagaacaaagagattctcgagatcattttacaatatatgcgtgaaaacaagatcaaatcgtatgacgagaagactggaaaaggtctgatccggcatgcattgatccgctatggattcaagacaaaagaaattatggtctgtcttgtgatcaacggaaagaaacttccgaaagcagagcgtctgattgaaaagcttattcagattgagggcatgacaagtatcacgatcagtccgaatacacgaagagataatgtgattatgggagattcctatgaaattctctggggacagggatatattacagattatatcggaaatgtaaaatatcagatttccccattatcattctatcaggtaaatccggtacaaacagagaaactatacggacttgcacttgagtatgcagacctcaaaggtgatgaaaccgtgtgggatctgtactgcggaatcggaacgatttccctcttccttgcccagaaggcaaaacaggtttacggagttgagattgtgccgcaggcaatcgatgatgccaaagaaaatgcaaagatcaatgcgattgataacgcagaatttttcgttgggaaggcagaagaagttctgccggaatattatgcagagtatgagcgagagcataatggtgagacagctcatgcagacgtgatcgtagtggatccaccgagaaagggttgtgacgagacactgctggagacgatcgtgaagatgcagccggagaaggttgtgtatgtaagctgtgacagtgcgacattggcgagagatctgaagtatctgtgtgcgaatgggtatgagattacggtgtgcagaggggtggatcagttcccacagagtgtgcatgtggagacggttgttcttttgtcccaacaaaaaccagatgacacgatagagatcgacttagacctggacgagctggatgccaccagtgccgagttgaaagcaacctatcaggaaatcaaagattatgtgctgaaagaatttggcttgaaggtttcaagtttatatatttctcaggtaaaacgcaaatgtggaattgaagtgggagaaaactataatcttccaaaatcagaaaatgcaagagttccgcaatgcccgaaagagaaagaagatgctatcaaggctgccctgaaatattatgcgatgatctaaggacatcgctgatttcaaggaggaataacacatgaaaagcacatttgaaaaaatgggtggaacctacacacttggcgcagacggaatttactatccgaatcttgtcagtacagatgaagaaccgcattatgggaaatatggaatgatgcggaaaacatatctgaaagagcatcgtccggcaatgtattcactgtatatgttggaagacagactgacagaacatctgaatactgtggacgatgaagcacaggagagaatggatattctggtgcgtcagatgatggagcagcagggcattacggaagaattgaaagctcgtgatcagatggaatgggtcagagcggtaaacaatatccggaatgctgcagaagagattgtgttaaaagaattagtgtatatttaaagcgtggaaagctccttcgggagctttttaccgtttctacaaacaattttttctcgtgccggaaagcaatctatttacatggaacagatgcagagagaaaaaatattggaaggttatgattcttgatcagcttttttgctattgctcttttgaagatggtaaaaaaacaagtgatatggtaaaataatactattagattgaacggacagaaatgaggaaagttgatgaattaagaaatgtaattgcaaatcaatttgcctgcgaatataaggcttatgactttggggaaatctgtaatgcattcattgatgatttgattagattaatggaaaatagtattaaaaatgaacaaggcaatttttagttgacataaggagaacagaaaaatatgaaaaaatattacgcagaaagacatggtttacttacaaagcaactacagatagattttgatgagttattacagtatttcggacaggtatataaatatttttgtgataaagagtattttgaagtggctacaagaggagtgtggaggcaaattccttatacgcaggattcggagcagattttaccaccaagtttgttgccatcaccggaagtgtattttgcaacatgcttacaggataaagaggtttggccaatttggcaatatcttgaagaatatgatgagcagacattgttttcagtgattgagattttatacgaccatattggtgtttataactatgaaacagatcagtttgaaaatgaagcacaaaaggaagaatttgctgaacaaattaataatatcttacgtgcatataaagagggatattatcttgaaccgacaaatggatttataatgcaaatacctaacggtgcgttgcgtgaacagttagaatatgacggttctgatttacccgattcagtatatgagcaattagcaacagccacagaaatgtattatcgttttgatgccaatttagaacagaaaaagaaagctattaatattcttgccgatattttggaaagtgaacgtgaagaagtaaaagatactttaaatgctgagtatgaagttcctaaaaatgaacatgataagttgatttttggtatagttaatggttataatattcgccataatcgtgcagatcaaaagaacgattatagcaaagaaatatggtatgattggatgatgcaatattatacaagcgtaataatagcattttacaagttgaaaaataagtataccgatattgatttttaaatggtgagttaaatgatatctccctaagtggagtataaattttttctcaaaaggtgatggtttcgctatttagcataaaaagtaacttagaagtttcagaattaagttaatcgtgccacatggcttgattataaaagcaaagataaaaacgcaacgtacatctttgatgtaccagagccggtaggtagcccggccgtcctatataaatagggtaagtaacctgcccctccgggttgtccattctttgttcaatcatttttaggagggatttttatggacaaagtaaatggaaagctgacagtattttttgaagagccgttttgggtgggaatctttgaacgcatcgaagatggtaaactatctgtggcaaaggtaacatttggtgcagagccaaaagattatgaagtacaggaatatattcaaaagtgctatttcagtttgaaattcagtccggttgttgaaactgttgtaaaggatatcaaaagaaattcgaaacggatgcagcgggaaacaaagaagcagatgctggaaataggcattggtacaaaatcgcaacaggcgttgaaattacaacaggaacagaacaagcaggaacgtaaagagaaaagccgcaagagaaaagaggcagaagagcagcgaatgtttgaactgaaacagcgaaagaaaagagaaaagcataagggacattaaagttccttgggcttttactcaaatcgtaaatttttgaataaagctttcgggggtgtttctatgaagaaaaaagtacttgcaattatgttggttgccgtatcaataatgctgatttcggcgtgcggaaaaaaagaaaaactatacgaaattcctgacctatcgaagtataagacagattatgtaggagattcttcgaatgttataaatattgtaagcggtcaagagtatccggagggatactcatatgatagtatagagatacaatctgaaacagagccttatggattaacagtttttctaaaagatgagccgtctgcagtcaagcttgaagatgaattgcaggttaatgcagatatgacatttgatttgattggtaatttgggaacaattgattataaaacagcagatagcaaagaaattattgtatcatatgaacggtgatatatttttagtcaacttttagacaatttgaagagcagaatataaaaaggcgtatggaagttttgatttccatacgcctttttgaaaggagtttatttttgaacaagagatttgtaagagcatgttatctactcgaagatgattacaattccatatcataggactttttcttagctcttgcaggctgatttcgccgcatttcctgttctcgctgatatttaagttcccatgcacgatgggagaaaacatcaggatcctccacattgagataatccacctcatcggctgcaatatcacgacggtgatagtcataatatttaccgaaagtccccttgaactgttcaatcagcttatcccggaaatcaggacgtatctggattctggtatccagtaactcggtatattgttctggttcaggacgaaatttttcttcccggaaagcggcggcgtctttttcaagctgtttttggagcgagatgtcctgagaatccaggatatcaagattgttattcatctggtcatatttcttggatagatttgtcatagctttatcggtagagcattgtgcctggaagattagctgctctttccttgatttcagttcttcaatttcttcggtaacagtggtaagttgctgattcaattttatatgctgaatgggattcaaaatactggttttctctttttttacattcagctctttccgttctgtaactttagctttgagtttctttttaacggtgttgtatttattcagtattggattaaaatgattcatccagtcatggatcacttctttttgcatctcattgtggagcaaatgatactgtgtaaaaatcatatgattgcggatcgcttctaacgtttcagctattattggaatagacttttctacagcttcagccagttttgctacctttgcttttaattctcggagcattttgttatccgcacgaatctgacggttgatttcacagcggtctgctatcatgcctttcttttccatattctgggcaatgtagccttcatggatggttggctgttcggtgattccctgatctgcaaagctgcggtgatcaatggtagcatttatctgattacgtgcaagcattttatttacggcatctgcccagtttgcccgccagatacaaagttgttcatcactgttccattgttgggaaataggattctgtctgccatatcggctgctcttggggtgtttatcaatccgttcatatcctttttcctgtgcaacagaggaagtcagatattctttcttttttccaactttatagcgatattgcttttcccatccctgtttctgagcagttttaaattcagaagcagtaacccctttttcttccccatctttgatacagagatattctttttctgttttatactgccatgttccattttcatttaatggtcggacagtaagaagaatgtgtgcatggggattgtgaccatctgtatcgtgaatggcaaaatcagcacacatccccatatctacaaaattctttttaataaaatcttgaagaagagaaatattgctgtctttatccaactcaacggggagtgcgacaacaaattctcttgcaagtcggctgtctttggtcttttcggtttcttccacagcattccagagttgttcccggtcattccattccaatggagccattggaggaagcatcacctcctgatagatcagcccctgctttctggtatagtcatgctggatgccgtcataatcattgtacatgcggctacagctcatataagcagaagcagcaacggcagaccgaccggaaccacggctgacgactttggcttgcatatgataaattgccatatctggcacctcctttcgatgttgcctgcaacagcggataaagccctcggcagagcgcacgagccccgaaggggataccactgcctgatttatcaggtggtgagtaagtgcgcccttcgggagtagaacttgtgcgtttacattccccgtagtcggatcatcagctcccgtttcagggaatctaaatccatttctttaatatggggaacaatactttccagaatggctccttcctggactaatcggtgtgttctggcatcacgttcttttttgcgatttcttgcttcggcttcttcctggcggtgtcttgcctgtaaaagtgctttttcttccggtgtcatgattcttttatctgccatacctggcacctcctttttatgcccgtatccgggcagttttggttttaaaatcttttggtttggtactatggttttagataactgacagtggcatgttcttggtgaaaaataaggaaagatagtagtaccactgtcagtgaaaaataatcattgcgttatacttctttgagtcaattctggttcggagcatgattgttcaacaggatttttttcgcccgttttaaattatctgttgcattgtcctgacggatattccggttattgatacggacaggaatacatctctccagaatacggtcataaattcgtttgtgtgcgatatcagcggcattattcagctctgataaagtgagattggtcgttatgatcaggggctttttactgcggtaacgactgtcgatcacattgaatacctgttccagtgcaaagtcagagtttcgctcaattccgagatcatcaataatcagaagactgtagcggtttaagctgttgatgaactggtttctgtcttcaaaatgcattccggtaagggtattcagaatctgggaaaagttggtcatcagtacaggaacgcctttttccagcagggcattggcaatgcagcctgcaaaaaaagattttccagtaccgacatcaccccagatgagaagtccggaggcgtttgctttcatctcttcccagttgcttacataattgtgtgccagttttatttccggattgatgccgttatccctggcaaaagtgtagtcatagagtgctttgtcctgtaagccgctggttttaagatgctctatttccatttgtttttcatgaagttttctctgggtttcttcctgctcaaagatttcctgctggcatttacagcgaatggaaggaataagcacctttccctgtaattcatgccggcattgtcttggcgtattgcatttggaacagtagatcaggtggtctgtttcgttaaaatattcatcaggctgaagctctctgtttggtgttatagcggttgcttttcctgtaaatcttgtcatagtgtttcgtattcctcactttcgtaatttctttgccgggaagcaggatgatcctgtcttgcccaactgatgatggtagctgcatggttctgatattgttttccggtagaagccatataaccggataagcgttcaatataatccttccagtcagggattgtctgccggatatcttcaagctctttttctgacagaaaaacattttgaaattttccatagggtgagagtggctccttactccctcttattgctaaattgttcttttttatctctttcttattaccagacagttttctgtctgtatcagggaaagaatcctgtctgtcaataggacagttttctgtctgtcttagggaaagaaatctgtctgtatagtggatggtttcttttgggagttttacataaattcgattgggctgtccgggtccctgccgttttcggaagataagctcctgtttttccagtactgccagagcagttttaatcgtcatctggcttttgtggagaacttctgccagtgcttcaattgtaaagtaaatgaacacatgaccatcgatatctgaccagccctcatttttctgggaaagccttgcccggtcgagcaggataatataaagcattttggcagtttcgtttatttccatgtccagaaggaaacggggaaacatcatataagatggcaggttggtgtctgctgtcagaaagtccgtcatgtgttcacctccaatcagttattctccaagaaaatcccagtctacatcattatccggctgtgaattttcaggtgttggaaaggacgccctgatttggggctccctttgcgccatgcctacagtcagtccggaaagaaaaagtggcaattcctgtttcagactgttttccactgcatctacaatctgtttcacaaaaagttcttcccgttctcttgtttccagataaggatcagcctgtgtgcggtagtagcggtcaaaataatctaccagtgcaagagagattacctgactgtaagatttaaaatcctgcctgtccatcgtctgtaaatattcccaggctctccgctgttgttctttgtccagattaaagcgcaggtttgtgttgcggatattgttctgcatggtttatcccctccttttcaggctcatataagccagagattcgtaacctttggcagtggcgcagatgtcatcaatgattgtgactcgtgatttgtcatacgttccgaagttacggatcaggcatccaccgccgccaaccacatacaggcgcatcaggtcaggattatattcatatttgcggagcgtggaaaaaagttctgccacatactgtctggcaatagaactgatacaatccagatatggtgctgaaatgtcagctgttccaaaccgcagaatctgttctactgtggattcttcaattttcactccgaatttgtccagaacagcgttctttgcggcaatcatgcactggtttacaccaagtttttctgtccagcatcggctctcctgagctttcttattgttaatatacagaatgttcatggttccgtttccgatatctgcaaggagattagttcccttgaaatttccaaggtggtttacaatagccggatatccctgtgggtaaaggctacatcccgcaaagtggagatgatattctttgccgttgaaacggtaatggacttctggattctggagcagataggaacgaaaagcttctctttgatttctgatccatgtcagaggaagtccggcagccagatgaacatctgcttcacggatggaaaagacattcagttcccttgcaatagccattagcgtcagaagataatattcttcgtccatagctttatccgggataaattctttgtgtccttcgccaatccggtagtaaatgccgttatattccagaatattcccggtgaagattggttcggtttcataggctttgattccggttggtgtgacggtgtttgctgttttcatattgccatagccatgatctacagcgatgatttttgtgtttttgagttctcgcataaaaaatacctccgttttcgtattgattgattcagcaggtcataccggtgtggtactgctttgctgtgagataagcatacgaaaatcggaggtaaaagacattgagtggaaattgagctggaattgagaaaaaagatatattgtgcgtacattcttcatgtactcttgttgtgatttcattgttttttatcgtataatatggatactggaggtggtttggatgaaatacaagattttagttgtcgatgatgataaagaattggtgaaaatgctttgtagttattttaatatgaaacaatatgaaaccattacggctacagacggaatggaagcattaaataaaataaaaatgaaaccggatattattttgttggatatcaatatgccacgcatggatgggattgaagtatgtcgtctgatacgcagtaaagtgttatgcccgattttgtttctaacagcaagagttgatgaagatgataaaattaacgggttgctttcgggtggggatgactatattacgaaaccatttagtcttcgggagttggaagcaaggattgtcacaaacataaagagagaagaaaggcatcaacaaaaaacggaataccgtttcatggatgaaatgctgattgattattctgaaaaaatagtagctatagccggacacaggatggagttcacaaaaattgaatatcagattattgaattcttatacatgcatccagggcaggtgtttgataaagaacgtatatatgcacaagtctgtggatatgatgcggaaggggacagtagaacgataacggaattagtacggcgtataaggaaaaaaatagcggattattcagaaaaagaatacatagaaactgtatgggggattggataccgatggaaaaaataagaaacttgtcactgaaaaaaacaattctgctttattttgtgatcagcttaacggcagcatttctgttatctggatttacagttcattttgcaggaaatatgcagaataaaatatgggaaaaatatattgattatgcagattatacggacgtgtttcagcaatatggaaagaaatacgagattgagatatcaagacctaatcaatcgcagatgaatcgtttggactatcatctttcggaaatgtgtgactttatggaaacatattcggtactgattttttcgattgttgggagtgttgttgcggtattctttttttataaaaataagttaaagacacctctacaggaactaaaagatgcctcacaaatgattgcagataatgaactggattttcatgtgtcctatgaaaataaagatgagatgggaactttgtgtaaagaatttgaaatgatgcgaagtgatttagcagataacaacagaaagatgtggcgaatgattgatgacgagaaggctttgcggaatgcaattgcacatgatatacgttctccactttccatattgcgtgggtatcaggaaatgctcttagagtttgtttctgccgagagtataaaaacagaggatgttattgatatcttacaaacaggcatgtatcagattgaccgtatagagcatttcacggaaaacatgagaaaaatgtcccatttagaacagagggaactgcaatgctcagagatagagttatcggaactggcaaaaaagattgaggcagaagctgccatgctgtccaagaaggaaagtaaattatgtaaggtaaaaagagtgcaggaacaaaacattgtgaaagtggatgaggaacttgtcatggaagtgacagacaacttactggaaaatgcggttcgatatgcacaaaaaagtattgctttgcagataaagaaaaaggatggttttcttataatttctgttgaagatgatggaataggatttgtggatactgaggaaaaagtaacagagccattttatcataagaatccacaagatgatttaaagcattttggccttggtatgtatatttctcgtattttctgtgaaaagcatggaggaaatttgaaaatatataatgccagacaaggcggtgctcatgtagaagctcttttcaaagctgaataaaaatactttataaggctgaaatcacaaataaagtggttttagtcttttttgttgtgaatttattgagaattgatttgtatgatgttgttaaagaaataaagaaaggaagagatacaatgaaaacaatcataaaaagaagtatacttgattatttaaagaaccctgttttgtggattggcttgattattatagttgccagtatgtatcaatgtctgtcatcgtatttgcaaattcattatatcaaacagaatgaacagatcacacaaaatgacgtagcattggaagatgctgatgtcatggatgggtacattcccacatctgatgataaagaaagaagaagggagtgggaagatacgatcaaagggacgttaatggacacctccaaaaatggttttggatttagcaggcaggaagcagatcatgtaatgaaagaaattcagaatatggatgtaaagactgcttctgagtttttggaatcccaatatggctattataatgcaatatatgcttatgaggaccttgaaattcataaggggacagcagaagaaatcaatcattatatcgagcggaaattatccgaacattctttttcctggtactttgccaaaaaatttacggattttgcaggattgcatatggccttttttgcaacagtcttgctatcatttttatttattcaggatacacgaaaaagtacctatgaattattacatacaaagcctgttacggcaatccaatatatatgtgggaaagtaataagcggattcattagtatgctgggagtattagtgattttgaatgttatattctttatgctgtgtttgaaaacgtctttagaatcgggctttccagtaacaccaattgatttttgcgtgaattctctgatctatattgttccgaatcttttgatgatatgttgtgtctatacaattacagcattaatatttaaaaatccgcttccggcagcaccaatcttgtttttacacattatatattcaaatatgctgaccatgaagaatgatatttattatatgagaccgttctctattatggtgcgattccctggcagattttttgaaacacatgtagccaaaatgtcaaacataaatcagattattcttgtaatttcatcagttatattagtatgtatttctgttacaatctggaaaaggaggagggttcattgaaaacggaactaaaaaactgcctgtcgttatataagattttttattcatgtgcatttatactgatattgtgtgctattcatccgattatatactatgaagaaatcggttcagcgattcagtcgccaatagcatttttaacaattattttttgtagtgacacatatttgatggaagtaaaaagtaagcgtgccgatgtatttcatttgtatgatcaaaaaaagcagttaaaagtaatatcgcagagagtgggcgttcaaatattatatttattaatactttcctgtgttggatatgttttgtttttctggcaaaaaccgggcagtgtaaacgaaggcatttcgggtattcagatatttcttttatatttcattgcaatgtttggaactatctggctttggagtatatgctctgtgattttgtgtacattgcttcgaaatatgtgggcaggtattggatgtttatttggaattgtcattggacttatatcaaaagcgggaagttcatttttcggaaatctgggattgttttctttcagcttttgtgaacctactcaattaatgtccgagagttggatttatggaacgcttgtgtcttttatagcggggctgtttttatttgcagtattaccaatgactttaaagaaaagaggatagattatgagtattagaataaatgatttaacagttagatttaaaaatggtgtagttgcagtaaataaggcatctcttgaaatacctaagggaatttacggacttttgggtgagaatggtgccggaaaaaccactttgatgagggttcttacaactgttttaaaacaaacggaaggaatggtttcccttgatggaattctgtataacgagggaaattatgagaaaatacagaaaaagattggttatcttccacaggaaatcgacttatatccgaatcttacggtgaaagaatgtcttgtatatatggggggactgtcaggagtagccagaaatgacctcgaacaaagaattacctattatctggaaaagacttctcttacagagcatcagaataaaaaaatgcggcaattatctggtggtatgaagagacgtgtcggactcatacaggcacttcttaataatccggattttttgattattgatgaacctaccaccgggttagatccggaagaaagaatcaggatccgcaatcttttggttgatttttcaaaggatagaactgtgctgttttccactcatgtagtagaagatttagcagcaacctgtacacagcttgccattatgaaaaagggaagttttttatattctggaagcgtgagtgggttgctggaaaatgcaaagggctgtgtttggaattgtacggtacaaaacgcagaagaagcccgtttgttagaagccaattattctatttcatctaagcagtatgtagaaaatggaattcatatgaaagtattaagcaaaggaaagccaaatgagaattgtgtcctggataatgatatcactttggaagatgcatatatttatttgacgaatagttgaatataacggcgggcaagttgcccgccgtaaattgtacttattttgttaaaagaccggatagattttttccaatgcaaaatccaatctgtggatataactcctgaatttcctgatattttgcttcaatcatttctggttcatcagcccagatcttttcatatattttgaaagctcttttaaaatgtgttttggcttgcggaagattggcagtcatcagataaatggttccaagggtttcctgtactttggcataatccagacagtcatcggaatggtattccttgatgatgccggataatttttgcaattcagagatgcctctttcgggttcctgctgttctgtcaggaacattgcataattggcaatctgaggtatgctgtcatttatatgaagcaggttaaattggtcaagcagtgagatacttttttccatgtgttctcttgcaagatcgggatgaccgttcatgcggtaaagtccaccgagattggcatgaaggttggaaacaaggcgagcattgtcagcagtgatattttctatctgggcaagtgcatctttttccagttttattgctttttcaggtttggtttcaagggttgcctgaaaatccagtaataacgcccggtcagagttggtgccaatgctttttgtctttaacagcaccttcagttccagaatgattcccttcatacctttgtgatagttatagttatccatgtatggaaatgcattttccagaaaaagcagatactttggcatatcatctttttcaattaattctatgatatttccgattgtttgaaatagctttttataataatctacttccattccatgcattaaacatatgtgctgtaaagaatccagaaacgtgtgacaactacttacagatggttttgtctctgaaagggtgatttcctgaatcatcggatgcagagagatagtgcgacgtgttgttgtctgaacgaaaccagtctcaattaaatcgttgatttcatttagtgtggacagttccagccatttggcaaatatacgggcagaaataccggtggaaggaagaaagcacatattacacatgatatcctgctgtttaagagataaagtgtataaagaaaacagcgtatggatatgactataataggtggctttgctgctttgtccatctttgattattttaattttatcttcgttatggaaagatgctttttccacctgaagtcttgttaataactggtctggagtcgagattccattttccagaagttttgctgccagttccacggcaaaagtatgagagtgaacagtttcgatgatcttttcaactgttgcacggtatgcgtctgcctctgaataaaatgctgatgccagctgtaagagagcgttcatatcctctatttcttttaatggcagagtacagtattcatccagtttgcttctggttgtaaacaaaatctggcagcgatattttaatactactgacagaaagctgtcctgtgtggcagtgacattaaaattatctatgataagcagagtatcggatttcagggaacgaaggaaacggttatgtctttgaaaccgttcctgttcagtgctttccggaagatcgtcaataaaatccatgtcagtaatatcctgatgaagattgccggtatattctacataaaggatattggtgtattgctttatgtaccgctttgcgtaggctttggcaagttcactttttccaattccggcgattccgcaaagaaaaacatgacggttttcctcaagcatggtatataattcttccagttctttatctcttccgataaaatgacggcatggtttcggaacctcactgtccataatataatccagcacaatgggggataaagcgcctccggcgagcagcttctgatttttggtattacgtttgatgaattggcgttccatgccaaaagaaatcagttttgcaagaaacagcagtcttgaactggctggtttatataagggagtcagatttttctttttcgcatctgagatgctgtcatcctgaatgaataaagtgtaaatatcttgtataaccatattacagtcagacatcagtggaagaagattctggtggatggtatgggctaatttttcctgattggatgacttggaatagtaagcggatattttaggactgattttagcctgaccagtcatccagcggcaaaccagaccgttgtccattgaaaaatcctgatttgtcggatcatccataaaatcttcaaataattcgtataaaaaatcaggctgactcatttgattactttcgctgatatgattttttaagcaagtgctaatagaagaaaaatcgcatcgattcaatagaaattcccctttcgtagttaagattaagtatatctatcataacacgaacatacattcgattcaagaaaatacggatatttttaaagtgattgtgtcaatttacaatcaatttctattcaatgtggttttccggcaggttctgtaaaataagctcagatcaaaacaataacgggaggagcttatgcaacagaatattgaatttgagcggtgcattgattttctggtacggatgattgataagtacggcgctgaagtcctccgggagttggaggaagaaaaacagaataaggaagaaaaagaagcggcagtttcctgaaatacaaaatgtaaatcagactgtcgcttttttcatgcatttttaaatcaaataaattttaaaagctgatgcagagtgtgtggctcattattctgagaagcggtaatacgagtatcaaatggcttgaaatgattctgcgtataaaagctcagaagaaattcattatcttcgcattcaagaaactccataacgccacctacggaatatttgagactggatatggtttccagtgcaaatcccagtagaatatttccaggaattcgtttttcctttggaagagaatagttctttcccaactgggcgatcaggtaagctgcggtagtataggattgtgtttcttcatccaaaatactgacacgggacagcttttttgccattgtcttgctgatatttgaagcacggacagagatgggttttactgtaagtgaaaaataaccaaccaatgaagcatcttcagcatcaaataccagataagtgatagattgatcttttttggtaaactcaatcgcattatgtaataaaaagtattccacatcgagatttttgggacaagaaaaatcggagagtaagtcgtaaagactttcctctccgatatatgtcggttcgtctttatccaaatatgcccgaatattaacggtaaaatatttatcagacatgttttttcttcctttttgacattaaagctaagatttcctgtgggttcgttaactgacgtccgggaagtgtctgctttggtgtgcggtcacggtcggcttcgtcaattgctgcgacaaaacgctttatgctatttggattggatacgacaaaattatgagtaatacttgaagtagccatactaacacctcctcttttttggcttttttgtgtatttatagtatatgcaatgtgtgataaaaacacaatatcgaaaacaaaaataatttctaaataattttcaagccggacatttattagacgcttccggtaagcgaacaatattttcgagccaatcatttataagtcgccaatggtgggcgggcaatattttgataacagaaatgctctgtatctaacttaattatacgattggcgaagaaatgcgtcaatacggaaaataagtattgaaaatagttggaacaagtactaaaattaagttgggacattgaatggaagttatgttacgagataataagaattgtaggtggaaggtttgaacatagaagcatatgatgctgattcattgagaaaaatggttaggttgcttgaatatgagaacaagatattaaaagataaattgaagaaagcaggcatttcatatgaagaggtgaatccttttgaagaaaaaatagaaagtgcagaagaatatgacctggatcaagggagtcgtattgtaaatccgccatatattacagagaaaatggcaatacgtttcttttcgatgttttggggaagagaagatgtatatgccagacggggaaagaacgggggttattttccacaatgtgcaaatcgttggaatgaccggctttgtcctaaacaacgtaaagagaaggtattttgtgatgaatgtgaaaataccaaatggataagtctggatgtaaaaaaaataattgctcatttgttaggcacaaaagaagatggatcagatgtaataggtgtatatcctttactgccaaatggaacatgcagatttattgtatttgattttgataatcatgaaaaaggagcagaggttacggactttgcaaatacggataatgagtggcataaagaagtggatgcgcttagaaaaatgtgtgagcttaatggtatcagacctttagttgagagatctcgatctggaaaaggtgcccatgtatggattttctttaaaaaggcaatatctgcggcaacagcaaggaattttggatttctcctgttagacaagggttcaacttccatcaatctgaaatcttttcattattatgatagaatgtatccttcgcaggatgtggcaagcagcataggtaatttgattgcattgccattacaggggcaggcacttaaaaatggaaatagtgcttttgtagatgaaaattggaatgcatatcctgatcaatgggatgctcttttcaataaaacaaaaaagctgggaatagaagatgttgaacaatgcatggcaaaatggcagggagaattagcagaagtcagaggaacgcttactaatattgagaagaatgtcagaccgaaaccatggaagaagaaatgtgagttttgtaagtcagatgttgtgggcaagcttcatatggtattgggcaatggagtttatattgatactctgaatcttatgccaagaatacaaaatcaggtccgtagtttggcggcatttgataatccggaattttacaaaaataaaaggctgggatattctaattattataatttcagtactgtatatttaggtaaggatatagatggatatatacagattccgagaggactgcgggaaaatattatacaggaatgtgaaaaagcaggcatttcagttgatgtttcagatcaaagagaaacaggacaacctatcagagtatcttttaaaggtgatttgcgaatgcaacaggaattagcagcagaaaaattattatcacattcagatggggttttgagtgcggcaactgcatttggaaagactgtagtatgtagttaccttattgcagagcgaaaagtaaatacgctcattttgctgcaaaataaagatttgcttaatcagtgggttgatgaattgaatcatttcttagagataagagaagaaccaccggaatatgaaacaaaaacaggaagaaagaaaaaaagaaatagtgtgataggcgttttgcacggaaataaaaatacattgacagggattatagatgttgcaatggttggttcaatgtacagcagaggaaaatttaatgaacggattaattcttacggaatggtaattatggatgaatgtcatcacgcagcttctaacacatctatggaattattgcagaaaataaatgcaaaatacgtatatggtgtttctgctacacctaaacgtggtgacagtcttgatcggatcatctatatgctgttaggacctttgagacatagatttactgcattggagagggctaaggaacaggggattggacattattttgtcccaagatacacaagagtagttgatactgcagaaagcaaggataatattaataaagcatataatttgattagtaccagtaaggtgcgcaatgaaatgatcatagatgatgttataacttgtgttgcaagaaaacaaactcctgtaattttgacaagatttaaggaacatgcaaaatttttacatgatgccttaaagaaaaaagcagatcatgtattccttctgtatggggataattcggataaggaaaatgctgaaataagagtaaaattaaagcagatacctgaaaatgaatcgcttattttggtggcaactggtcagaaaataggagaagggtttgatttcccaagactggatgtattaatgcttgcagcacctgtatcttttgaaggacgcctggaacagtatgtaggtagattaaacagagattatgtcggaaaagaagccgtttatgtgtatgattatatcgattcgcatgtgcgttattttgataaaatgtatgcaaaaagattgagaacatataggaaaatgggattttcaatctggacgcaagagttgcaacctaaacaaataataaatgcaatatttgattctgtaaattataccgaaaaattcgagcaagatattgtagagtcagaaaaaatggtggtaatttccagtccggatatcagacaggataaaattgacagatttttattactagtcaagaagagacaggaagtaggggtaaaggtcacagttattacaacagatccggaagatattacttacggaaagtcagatgtatgttatgaattaatcagagcaatgcaattggtaggaataaatgtgataacaagaacagaagtagaagaatgttttgccgttattgatgatgaaatagtatggcatggtgggatgaatctacttggaaaagctgatgtctgggataacttaatgcgtatcagaaattcacaagttgcaacggaattgttggaaattgctttgggatgttctgaggagaggaggaaaagtgaataaaaagataaaatgtgatatctataccagagtatccacaaccatgcaggtagatggctacagtctggatgctcagaaagaaaaactcgagagatatgcggaatttcagaacatggaaatcgtaaatgagtattccgatgaaggtaagtctggaaaaagcgtagagggcagaccggaatttcagagaatgttggataatattgagaatggaacagatgaggtgcagtttgtactggtgttcaagctttccagatttggtcgtaatgcggcagatgttttaaattctttgcagaggatgcaggattttggagtgaatctgatctgtgtagaagatggaattgacagctcaaaagatagtggaaagctgatgatttctgttctgtctgcggtggcagagatcgaacgagagaatatccttgttcagacaatggaaggacgtaagcagaaagccagggaaggaaaatggaatggtggatttgctccgtatggttatgaattagtaaatggagaattgcagattgcagaggacgaagcagagattattcgtctgatctatgacaaatttattcataccaatatgggaatctctgcgattgctgcatggctgaaccagcatggatacaaaaagaaaaaacgacagaataatacactggacgcatttgccgcttcatttataaagggcgttctggataatccggtatactgtggaaagctggcttatggacgaaggaaaaacgagaaagtttctggtacaagaaatgaataccgcattgtaaagcaggaaaattatatgctgcacgatggtatccatgaagggattgtttcagaaacagactgggagctggcacatcaaaaacgggaaaaaacaggtgtgaaatatgaaaagacacatagtttcgatcatgagcatattttatccggaatattgagatgcccattatgtggaagtggtatgtatggaaacgtgaaccgaaagaaaaagaaagacggaaccttatataaggattatttctattatgcctgcaaacatcgtcgcctggtagatggtcataaatgtggatatcgtaaacaatggagcgaggagaagattaacaatgcagtggaagaagttattcggaagctggtgaagaatccgaaatttgaagaagcaattctgaataaaatcggttcaagaatagatacagaagaaatagaaaaagagattgaaagactggaaaaacagcacaggcaactgaccggagcaaaagcaagacttggacagcagatggatagtctggatatcatggataaattttatgaaaagaaatatcaggatatggagacacgcttatatcgtctatatgatgaaattgaaggcgtggagaatagtatagaagaagttaagaatcgcctgctgaatatccggcaacagaaaatatcagaagaaaacgtctatcaatttcttttatattttgataaactatatgataagttcaccgacctggagaaaaaagaatttcttaatagctttgtagaacaggtggacatttacgagcaggagcagccagatggcagattcctgaagcacataaagttccgttttccggtgtattttggagacagggaaatacaggaactttgttgggacaacgaaagtaccgttgagacggttgttcttttgtcccaacaaaaaaccagatgattatattaatgtcacgattgaacttgatgatgtggatgtaacatctgcagagactaagtcaacatatgatgagataaagaagtatgtggctgaacataatgctggcatgaaggtctccaatctgtatatttcacaggtaaagaaaaaatgcggaattgaagttggaaagaatttgcgcgttgtaacgaggagaatggactgcttgcagggcaattcgacgactgccgcgacagacttggaacttgttccaagtcctaatttacctaaaaatgaagatagcaggcagccacagtgcccagaagataaagaaagtgcaattgtggaggcattgaagcattttaagatgaatagttaataaagagaggtgcatatgttatgccaggtatactcgtggttgaagatgatgaaaatttaaatcgtggaattacattctcactgaaaaaatccggatatgagattttttcggcagaatcagtgaaaaaagcgaaaagaattgcaagtgataataatgtggatgttaccatttgtgatgtaaatcttccggatgggaatggactggaatttgtaaggtggatgagatgcaattataatacatacattatttgtcttacagcactagatcaggagatggatcaggtcatgggatatgaagcaggggcagatgattatattacaaagccgtttagtctttcggtacttcttttgaaaatagaagcacatttccgccgcagacaggagaaaacggaagccggaaagatgatttcgggagatatcgtatttatcgcaggagaaatgaaagtcctaataaagagtcgtgaaatcagtctgacaaaaacggagttgaaaatgctgactttttttcttcagaatccgaaacagattctttcaaaaacacaaatattggaaaatgtgtttgatctggaaggggattttgtggatgaaaatacaatcgctgtcaatatcagaagactccgtgagaaaatcgaagacaatccggctgcaccggtctatataaagaatatcagaggtcttgggtatatatggaatcaggaggtaaggcagtgacaaagagatatcgcaagaagattacagtagtgctctccttggtattacctgtcatattattgtttgcaatattaaattgctttaccacgtatgtgttttatgaagattataaatataaaatgaatcttatgacagagattgctgcaaaggaagaattttccgggctggatgctgtttcggaattgcttaaggataaggatattgaaactaacgaacagggaaggcgattattggagcaatatggatactgggggaataaagggaatgcattttattcgcaattccggcatcaggttatggtgaccggtgctgtaagcactgtgatatgcgtgcttcttttgacttttttactttattggaagaaaaaagaagatgcgtgtcatcagaaaattttagaccagttggaagaaattctgatcagattccgtgaaaataaatttgatgctttactgaaaacggaaaattatgcagaactggaaaaattgaatgaccagcttgaagcaatcggacatcatattcagttgataaaggaagaagcaagggcagaaaaggagaacacgaaagaaatggtttctgatatctctcaccagttaaagacaccggttgcagctttggatacatgttttagtgtgctgatgcagaatgacttaagtgtcacagaacaggaggagtttcgtatccgttgtcggagtgctctggatggactggagacattattgcagtcgcttcttgaaatatccaagatggaaactggactgattcagattaataagaaaaaacttccgcttatggatactgtcatatctgctgtgaaccgcacttatcctaaagcggatgagaaagaaattgaattcgtttttgactatgaaaaagagctggaaacatgcacgattatgcaggataaaaggtggcttggtgaagctgtgatcaacgttctggataatgcggtcaagtacagtccgggtggttcaaaaatatttatccggttacaaaaaagaaacgatcttgtaagaatggaaattgaggatcagggaattggtattccgcagaatgagtatcacaaaatttttcaacgattttacagaggaagttccaaggaggtcatggaaaagagtggtacaggaatcggactttttctatcgagagaaattatcgaaaaacacgcaggtacgattacggtaacctccggcaaaaagaaaaaaggaagcacgtttgtgattcaattaccatatgttggttaaattttaagtgagcagaaatcttacaattctgtaagatttctgctcgttttttgaaagtgaaatgaaagattgtcctgatacaatttggatgtaggttgaaaaatgaccaaatatataaacaggcaaagaaagcgtgctgaaaaggtacgctttacagaattgaaaaggaggcaacacatgagtgtgatattagaaaccaagcagctttgtaagttttatggcgcaggtgagaatcaggtcaaagcggtcaatcaggtggacattcagattgagcagggagaatttgtcgcaattgttggaaagtcaggatccggtaaaagtacattacttcatatgcttggagggctagacaccccgacaaaaggcagtgttactttagcagggaaagatttatacaggatgaaggaagatgcccttgctgttttccgcagaagaaaaatcggatttgtttttcaggcatttaatctggtttcatctgttaatgtctgggaaaatattgtactgccactggggctggatggaagaaaagtggatgaagcgtatgtaaatgatattattgcaactctggggattgaaaagaggatttacaatttgccaaatcagttatccggaggacagcagcagagagtagcgattgcaagagcactggtgaatcgtccggaaattatatttgcggatgagccgacaggcaatcttgattctaagaccagtgatgaggtgattgccctgcttaagatgacagcaaaaaaatatggacagacaattgtaatgattacccatgatgacgaaattgcacaggttgctgaccgtattctggtgattgaggacggacaggtggtggatttcagatgaagacaataagcaggattgcatatagcaatgacaaaaagaacaagacaagaagtatactgattatgatgtccatatgtctgaccacgatgctgcttgtgattatcagtactgtgggaaatggaatgatacgtttgcagaaaagtcaggcggcaggctcatatggaagcaattatggtctgtttgtcgcagcagatacctcgcagttaaaggaagtaagtcgccgtgcagaaatagatgcaataggaattatgtgtacagaaggcatcataaaaggcaatgaaaacggcgggtttgtctgcatggatgagactgcaagaaaaatgcttccctataataaggaatatgagttaaaggaaggaaagtatccggaaaaaatgcaggaaattgccgccggaagagctttttttcgtgcaatgggatatgatgatgtaaaggtcggagatacggttacactggattaccgtgcagggatgcggtcagaatataagccggaagagtttgttgtcagcggaatcctatatgatcgggatgaatataccattgaggcatcttatgttgctttcgggtcacaggagttttatgatgagcacgtcgcagagaatgacagacagtataatatttattttactttaaatgattctgcaaatgtatctatgaataatattgaaccggttataaagcagattgcagcagcttgtgggatcgaagaaaaaaacgttatagtcaatgatctctatttgcaatgggtcttgcagccgagttatgaaacgattgcggtatgcggggttttgattcttgcaattgtacttttctctgttgtggtcatttataatatttttcaggtcggtattgccaacaagatacaggagtatggaaaaatcaaggctctgggagcgacaaaaaagcagatgaaacaactgatcttcagagagggtatgtttttgacaatttcttccataccagttggattgcttcttggttttctgattgcaaaatgcggttttaactggctggtagaacagggaaaccttgtatcaacccaaactggctctatgggagtccaaaatcagcaggtgccactgttttccctgcctgttatacttctatgtattttcgtatcatttcttaccgttgctttggcactgcgcaaaccaatgaaaattgtttcacggatttcacctatcgaagcaacacggtatttagaaaatgcagagacacacaaaaaaggaaaacgaaatggcagaaaaaatgtcaccgtgttttctatggcaatggcaaatataacgggtaatccaaaaagaaccattggtaccatcctcacactggggctttcctgcgcattgtttgtgattatctctaattatgtaggaaatattgatacggagcatgaagcacgtctttccgttaatcatggacaatttgaactgcagcttgactattctgctgagtacgatgaaagatatccggagaataatctagatacgattctgacggataatccattgaatgattcgctgattgaagaaatcaaaagcattccaggagtgacagatgtcatgacgagagagattgtctctgtaaatctgaacggaacaagatttccggctgctattgtgagtaaaaatgattttgattttatgcgccaggacggggatattggctctatggactatgatcaggcggtaaagaatggtgatattttctttggctggtcaacgtggatggaacaagatggatatgctccgggtgaatccattgcatttgactttgagaatggaagtggaacctatacctatcagggaaagattgcaggatcttttgtaagtgcggacacttatcttgtcattccggaaggtgtatatcgttccatgaatccgagaggaacagcctatggctatctgtgggtggactgtgataaaaaagatgtgacatctgtggaacaaagtctgaatactttgatttctaatacttcgcatataaaaatggatacctatcatgcacagttacaatctgcagaattcgcagcccgcatgatgaagctcggctgttatctgtttatggcggttgtaggactcatcggttttatgaatatggcaaacaccataatcatgaatattacgacaaaaaagcaggaatatggtgtattacaggctgtgggtatgacaaataaacaattaaatttatgtctgcagttacagggaatgatgtttacggttggtaccatatgcgtagctttgatcattggtctgccgctcggctatgcacttttttcctatgcaaaacataatggaatatttggaatgaatatctattatgttccaatcgtaccaattcttattatgatttttttggtcggcctattgcagattgtactttcctgcgttttaagcagtaatctgaaaaaggaaacgctggtagaaagaataaggtatcagggatagcaagtaatatgtaatgaactaggtcttaacgaagaggagaaatagataacttccattttgtatgtatgataaatctaaacagtattttagcaacatttcctactggttaattaaattaaataaaaattaaacactgttcaattgtgcaatctatatgaatctgatatgctgagtatacaaaagcttttgaattttttaggagatgaagcaaatggatataggtgttgttataaaaaaatatagaaaagaagctggtatgacgcaggaggagatggcaaacagattaggcgtgacgacaccggctgtaaacaaatgggagaatagtaattccaagccggatattgaactgctggcaccaattgcaagactgcttgatatttcacttgatacattactttcttttcatgaaaaactttcagatactgaaatcgaagaaattatcaagaagatggacaggatgttttcagaagaaggctatgaaaagacttatgaatgggcattgagaattataaaggaatatccgaattgtaacatgcttatctggcagactgcggtaatgcttgatgcaagaagaataacggataaatacacgaatccggaaaaatatgataagcagattaacgcatggtatgagctggcactacatgatgagaatgaagagatacagcatcatgcagcagattccttatttggattttatttacgtaagaagaattacaccaaggcggaaaaatatctggactatttttcagaacacgatcctatgaaaagttattatcagggaagattactccagaaacagggaaaaatcaaagaagcatatgaaaaatatgaaaatattattttttccggctttagtacacttaattttgttctttccacaatggctggactggcattgcgggaaaatgatatcggttatgcgagatttttgtcagggaaggtacaggcagttgcacatacattggaaatgggaaaatataatgagtattcgccaatgcttgatattgtatgtgcagggaaagatgtagagggaacatataaggtggtaaaacatcttcttgataatgtgggtactatgtatgattttagaaagtccggtttatataagcatatgaagttcagagatattgatgaagctatattagatggtgtaaaagaaaaacttcttgaaggattcagaaatgaggaagaattcggctatatggcaggatatgaaccgtgggagaaattaatttttgacagataagttttttgaaaactgtcgtttggtaaaatctattccatttttaaaagccttgcgataaaatatgttctgtgagacggttgttcttttgtcccaacatcgagacaagagtacttgtctcgatgaacgcggcagtcggcaaatcaagatgcaagcatctcggcttgcctcgttgctcgcgcaaaaaccagatgacacgatagagatcgacttagacttggacgagctggatgccaccggtgccgagacgaaggcaagctatcaggaaatcaaagattatgttaaaaaattggtgtatatttaaagtgtggaaagctccttcgggagttttttgctgtttataagataaattctgccggagattttgatttaatgatttgatttataaaactggcaatgatacaattagcgtaatttgaaagaaagcagagaaaatatgagtgaaaagttactgattgttgaagatgacaaaaaattaaatgatggaatccgtctggctttaaagaatgatgcttatttcttttatcagtgcagaactttgcaggaggctagagaaatcttgaaaaaggaagatatcacattggttttattagatgtgaacttgccggatgggaatgggattgattttgtaagagaaataaggaaaaacagtcaggtgccgattattctgcttacagtaaataacatggaagtagatattgtaacaggattggaagctggggcaaatgattatattacgaaaccgtttagcttgatggttttgcgtgcaagagtgtctgtgcagcttagaaataaagaggcagcagctaaaaattctatggagcttgatggatttgagttctatttcgataaaatggaatttttcaaagatggagaacctattgaacttagtaagacagaacaaaagcttcttagagtgctgtgtgaaaacagaggaaaagtattgaaacgggaatatctgattgacgaggtatggcagggggatacagagtttgtggatgctcatgctctgactgttgcagtcaaacgcctcagagacaaattagaagatgatacgcagaagcctgaatatgtcaagacggtttatggaattggttatacatgggcggtgaatggatgatagaaacaattatgttgattgtagttatatttgtcctgagcggagttttttggtacagctttttttatcagaaagaaaaaaagcttttgaaccggctgcagcaaatgctggattgtgcaatagatggagaactggaacggacagaaatatcagaagaaaagtattctgctcttgaaaacagcatgaaacaatatatagacagtagttttctggcaaaaaaaaatcaacaggaacagaaagaagtgatacaaaaacttatttcagatattgcgcatcagacactgactcccatttcaaatctgaaagtctatggagaaatactctctgaagtgagtaatgaaaatcaagaggagatagctaccattttggagcagacggagaaattggattttctgatacaatcactggtcaaattatcacgaatggagagcggaattatagcagtacatccggaggatactgttattgcacagatgtttgcatccgtacagcagcagtttaatgtaaaagcaatggagaaggatatttccctgaatctatttgacacggatttacatgctatgtgtgatgcaaaatggactgtggaagcacttggaaatattgtagacaatgcgattaaatacacagcatgtgggggaaatgttcagataaaagccgagcagtattctttctttgtaaagatcgatatcattgatgatggcattggaatagaaaaagaagaaataccaaagatatttggaaggttttatcggagtctgtcagtggcagaccagccaggagtaggaattggcttattccttgcaagagagatcattcaggcacaaaaggggtatataaaagtgacatcaaagagaggaaaaggttctacattttctgtgtttcttccaatagcaaagaaggaatagtatcaaaactgtgacatttcagaaaccagatggagacattgtcatgataaagtctgtattgtaaagatcaatacaggcttttttgatgggaggatggcatgaatatattaaaagcagtaaatttacgaaaaatatatggacagggagaaacagaagtcagggctcttgatggtataaacctggaagtagaaaaaggggagtttgtagcgattgttggaacctctggaagtggaaagtctacattgcttcatatcattggtggtttggataatccaacatccggtcaggtcattgttgacggacagaatttaagccatatgacagatgaagagcttactatttttaggcgtagaaatattggatttgtatttcaacagtataatctggttccgatgctgaatgtatgggaaaatattgttcttcctgtaaaactggatggaaaaaagattgaaaaaggttatgtaaatgaaatcatagatacactgggtattcggacaaaactggaaaatcttccaagtgcactgtcagggggtcagcagcaaagggtggcaatcgcaagagcattagcggcaaaacctgctattttgctggcagatgaaccgacaggtaatctggactcaaaaacgagtcaggatgtattgggacttttaaaagtcaccagtaagcgttttcatcaaacgattgtaatgattactcacaatgaggagattgcccagatggctgacaggattttacagattgaagacggaaaaattgtttcagacagtggtttggtatagtgagggcgattatatggtaaaagtagagaataaagaaacgttacgattattgacgaaacgttttatgaaaatgaaccgagcaagaaatattattgctgttattgcaatcatgttgacatcactgttatttacaagcctctttgtggggagcgtatccatgatactttccaaaagagcaacggaaattaagcaatttatggattcatcccatgctattgcgcagaatttgtcagaagaagatgcggagagattgcaaaaaacaatagaacagaatgaagatgtggaacgatatggttccggtatttttctgggagctggaatggacgaacggtttggattttccgtagaggttcgatatgcagatgaaaatatggcagaaagttttaattgtctgccaactacaggaagactgccggagaaagaaaatgaagtagcacttagcagcacgatattggaatctctgggtgttacaccaaagattggggaagaagtaacgctgacctgggaagtaaatcccatgctgaaacaatataagacagatacgtttcagatatgtggattctggcagggggataaagctgttttaggtcagatggtctgggtatccgaagcctatgcaaaggagaatcgttatcccgttacgcaggaagaattagaaaatggcatctacaatggagggaaagagtattctgtctggtacaagaacctttggaatctggaaaagaaaacggaaaagatatccaaagcagcgggatttacgaaagctgggacaggaatggaagtcaatccggcatataatctctttgaagaggattcattttcattttcttctttaattataatgattctatttgtcatattagctggatacctgattatttataatatttttaacatttctgtgaaaacggatatccgggcttacggattgttaaagaatgtggggacaacgggaaagcagttgaagaaaattgtacgtatgcaggcgtggagattatcagctattggcattccaatcggattgctttgtggttatcttgcaggtctttgtatggctccgtccttgactgcagatgctgcaattagtgcacaggcaggaaaaacggctcagacagtagtatcagcaaatcctttgattttccttgcagcgatatttttaacgcttttaacggtgtatctctccagtctgcaggcttgtaaaatggtggaaagagtttcgcctgtggaagctctgcgtttggcagaaggagagcagtcacataagaaaataaaaaagaatacttctgtaacctggtgggggatggcagttcaaaatgtgttacgaaattggaaaaagggattgattgttatgctttctatcgctctttctatggtggttgtcaactgtatcgtgatgctggtgcagggatatgattttgattcttaccgaaaagtgtttttagcttccgattttcaactggatcagatgacgggaagtttgtcaaatacgaatttcaacggtattacacctgaaatcaaagagattttggacgaatgtcctgatagtgctaagacaggatatgtgtattattctgaggaaacccacaagatggagccggaacttctgaaaacatgggaagcattcgcagataaatatgaaaaaaactggaccgattatgaagaacaggtttgggaagatgcaagggcttccaatacagtaagtgttcattttctcggaatcagcgagtcggtgtttgacaaattagaatggagaggggaaaaatgctcttgggatacatttaaaagcggaaattatgtgcttgtagattatggtgataaatatgcagagcatccggtttcttattatcagactggggatgtttttcagatggagtacaaaaatggaaaccaaaaagattacgaagtcattggagaagcactgatgccatatgcattggattatccgtatgcagaccttatctatattacggtattagttccagaagatgagtatattacccagacgggaaatgaatcagccatgtatgctgctatcgatgcaaagaagggcgaggacaagcagataaaagaatacattgatgaaaatattttgaaagaaaatgatatgatcaatgttttttctgtattggatatgaaagagagttttcagcggtatgtcagtaaatattatatgatcggtagttttcttgtcattattttagcttttattggcattatgaatttctttaatacaacagcaacctctgtaattagcagaaaaaaagaactggcacttttggaagttgttggaatgacgaaaaaacaggtatcgaaaatgctagtgactgagggattcctatatttgggaggcgcatttgcgattgcagtattattagttgtgtttgaggcagagaagattttagcaaatacactcggtacggcatttttcttccggctgcatcttacgatagtgccatgtgtgcttatgattccgattttggttgggattgcgtatgtgataccaaagtatcagtttgaaaagatgagtcgggaaagcattgttgaaaggattcggaaagaataataacaatgtgtaaattaggcgtatggatccgatccatgcgccttttttagaaaattacaattctatatcatatgattttttcttagtccgagcaggctgatttcgttgcatctcctgtttcagggaatctaaatccatttctttaatatggggaacaatactttccagtaaaaaattaatgggtgtcaggcactaaggtggattttatttatcgaagtcatcagggattaggaaagccgattaagatatatgtgtatgaaagctattgtaaaaaataatataacatgacataatcggattgactaaagaaacacagatatttataatatagacaaaatgagaatgacatagatggaggacagggtaatggagaaatctgtaacacttgaagaggcattaaaaagaattgaggagttggaaaaagagaatgtagaacttcgggaggaattggagtattacagaaatcgtaagttaagcggtcgtcagaaacataacgccaagtggatggcaatttataatgattttgttgttggatatgagagcggcatgacaatggtagaaattgcgaagaggaacaatgtcagtgagaggacgatttataggtataaagcgtattatgacaaaataaagagaaaagaggaatagaccatattgctgatgtcagcaatatgttatatgagagttgcggacaatttttttgaccgcaaaatggatggaggaattctatggcagaagataaaaagaaagaaatcgatgttacagtaacagaagaatatctaaaagaaaaactgtataaaattaggggtaaaagggtattgcttgatgctgatttagcagagatatatggctatgatacgaagggatttaatagacaggtaaaaaataatattgaaaaatttgatgaagattttatgtttgaattgacagatgaggaattagaagatttgcggtacaaaaattgtaccgcaaatataagttcaaaaagtcgttataatcctcatgtatttacagagcaaggattatatatgctgatgactgttttgaaaggaccgttggctgttaagcagagcaaggcattaataagaacctttaagaaaatgaaagattacatattagaaaatcgtgatttaataggtcagcgggaaatacttcagttaagcatggaaactgctaacaacagaatagaaattaacaaaatcaactcagatatgatatctattgaaaagcagatttcagatattgcagaaggcttgaaggatgttgtgacaaaatctgagttggctgatatgatgaacagctttgtttcagacgatgatgacaagtggctcatgtttaatgcaaaattcagtagtgcagatgaggtatatgagtccatttataaacaggcaaagtcatcaatatatgtcgttgacaattatattggtttaaggacgctggtacaccttaagaattctcctactggagtagatattattttattcagtgataatgttggaaataataaacttcacaacatagaatttgcagatttctgcaaggagtacccaacagtaaatttgtcaatgaaaaagacaggcggtatattccatgatcgttttatcgtgttggattatggaactgctgatgaaagggttttcttatgtggtgcttcatcaaaggatgctggcgctagaataaccagtattgttgaagattatggaatatctaaatatgcccctgtgattgccacgctgttgaaaaatccaactttgattttaccacaatagaggggagcgaatgattaaacattcgtaaagacaatctattaatacaagaggagtttggtaaattatttcatgttaccaggcaaactgtttcaaattgggaaaacggaaaaagttatcctgatttgcaaatccttgtaagcatgagtaatcaatttagctcgcacccagtgctctttaagataaagtagaaatagtgcaattttcacatgatattatacaagaattacatagaaatatatcgtattattgatacggtattcttgaattgtatgtgaggagaaaaactatggcagcgaaaagaaaaacattaacacagctatctgtgccaatatgcttagaaactttattttatatgctttcaggtatggttgatacgcttatgctatcatctgtaagtgatcaggctgtaggagcagtgggaacagcaaatacatatataggtgtttttattattatgtttggagtaatatcatcgggtatgatagccgttatgtcacaaaatatcggagctggaagaccggggatagcatatcaggcaaggcaacttggacttatattcaacgcattgataggtatcgtaatgtctgtcgttcttgctactttttctggtgggatacttagaatcgtaagtattgctccggctttgcttgagccggctgaaatatatcttagaattgttggcggcacatgttttttaaatgcactgattcctattttctccagttatttgagagtgtttggatatacaaaacattctttgataggaactgttgttggaaatgttctcaatataatacttaattcagtatttttatttgcattcaactggggtgtgatgggagttgctgttgccacggttatttcgagagttgtaaatcttattattgtagccggcatgggggctgtacttataaaagcaaagcagagtcctgagcgaattacatcaagaaagatatttgcacagattgttaagattggttttccttctgcgcttgaaacagcactttacaacatcgcaatgacatttatagtgcgttttatgaatcagatggatgtggatggaatgaatgttacagcgcgttcatatgcgatacagattgcaaatttctcgtattgcgtgggagcttcccttgctcaggcaaatgcaattatgaccggctggagaattggagcaaaagagtttgaggaatgtaacagggggacgagaaaagctgcgatatatggtatcatcacagcgacatgcttttccgtgacctttgcatttgccggacattttatcgtgcatatatttacggatgatacacagatgataaatcttgtggtaaagttgttaatagtagatatatttcttgaacttggaagggtaataaaccttgtatatgggcaggcgttaaaaacgagcggagacgcattttttccggttatattaggtgcgatatttatgtatttgtttgcagttggcggaacctattttctcggaatacacatgggacttctggctgtaggagcatatattgctatggcaggtgacgaatgtgcgagagcagtggggatggtacttagatggaagagtggaaaatggaagagtaaaggtcttgtagaagtataggagagagtatgtactttgaattaaaggaaaataaaccacatggtacaaaggatgatccgtttagtacatatcatataaaaaatgaaggacgatcatttcagataccggttcattggcatgatgaactggaaattatatatgtaaaaagcggttttttgactgttagtatatcaggagaaaattatattggaacccccggggatgcttttgtagtgtcgccgggtaatctgcattttatgggttcacagactgatacagcggattattttactttcctttttccgttaaaatacatatctttttgcataaatgacatgttggatgataaattattggagccgttaaaaaatggtcatctgatgataagtccaagagtaaaagatacagcaaaagaactatgtgagcagttggttgaaatatatgtggcaaaaaataagaaaactgagtccataataactgctcagataaagacaaaaataattcttttacagtttattcttgaaatgtgggagaggggctttgtaatcgaaaatgataaaagcgggagaaatacgatagaaaaagaaatgatttcatatatacagcagaattttatggaaaagatatcattaaaagaatttagtgagcagtttcatctttcggaaaaatatatatcgcgatattttaaggaacattttcatattaccctttcgcaatatataacacatttaaggttagagcatgcaaaacagctgttacaagatacggatattcctgttacagagattgcaatgcagagtggatatcagaatgtaagctattttatcagaagcttcaaaaaaacatatggagtttctccgttaaaatatagaaaaaaataagccaggtatatggttagaaaggagaggatatgcatatcttaccagtattatggatctatatttcagaaaaatcatttcctgggtactaagtgagacgttggaggcatctcatgtagtaaaatgttcggtttttacaacagtctgtttcgtgtgtagtttatcatcgtgatcacaatgaaggcgtgccgggatgtttttttcgaaagaagcagaagcaacttatgatcgcagtattaaagtattggcgaaggatcacggtatcatttaatatgtgttttaatctttattccctcctgtgtgtatgataaaatagtaataggaattttatcgacagacagggggaaaaattatgtcaaaaattgtgaatgaaccaaagatcaaaaacaagtttgtagtcaagatcagagagcttttggagcaccgtgcgttctgactttatctcttggtggatgaggcagaaagccggatgtagtgacgaagagattgcaagattgtgtgatattgcaatgtgtggagatcatggaatcggaaaatgctttggcactcgactatttcaaagagaatcagatcagttttgagtggatcgtggatgaaggcggtgccgtgattcgattcgctccaatcgatatagataaacagcaatacgcatctgtgcacggagaaaatgaaaatatatctgtggaaaagattcatctgacggtggatttttatagagaattgattggaaaatataagtaataagtggagagaatatgttaaatattatagaaatcaacaactttaacgcaccggaactggacgtctacgcacgttatacggaagcacagcttctgaataaagaccgtccggaagatggactttttattgcagaaagtccgaaagtgattggacgggcgttggatgccggatatattccaatatctgttttggttgaaaagaagcagatggaagaaaatgaagagacgcaggaagttcttgcaagatttgagaatacaggcacttctatttttacagccgagtttgatgttttgacgcaattgacaggattcaagctgacgcgaggaatgctttgtgcactgaaacgccgatcgttggaagatttcaggaaactttgcgaaggaaagaatagaattgccattttggaagacgtgatgaatccaacgaatgtcggagcaatctttcgttcggcagcagcgatgcatatggatgcagtgttactgacttcaggatgcagcaatccattgtatcgaagagcatccagagtgagtatgggaacggtgtttcagattccatggacatttattcaggatgataaagaacgcagatgcgacaggaaagagatctggccggtccaggcaatcgaaagcctgaaagcacttgggtataagacagcagcacttgcattgacagatgattccgtaagtattgacgatccgcaacttatgagcgaagaaaaactggcagtgattcttggaaccgagggggacggacttatgcaggagacaatcaaagcttgcgattatactgtgaagattccaatgtcacatggtgtggattctctgaatgtggcagcagcaagtgcagtggcgttctggcagttgagaaaataaaaatttagcgtagagattcttgtttgagtgcggacgaaaactgaaaatattattttagaaagtcgcttgttagaagaatggtacaggaacgccgactcagggttacgcatactgttcatactaggaaaaacaacagactgctaagagcaaagaaaggattgacaaactcgctgccgctcagacagctgtcaatcctttctttaacgcaatccattgtttttcaagtatgagcaagcatgctccacattcgtcttcgtccctgtaccatccttctaacatgaaacttctcgaagttcatattttctgttttctgtttactgaaaaaggatcgttttctacgctaaattttattaaagtaaatacgcttaagaaatgggaatcattctatagaacatccggtacgtctacttctcaagtagagttcttctttcgagagagcagaaatcagatagcactgaaaacttaccgatagacagacattgagggattgattcaggtgactgttctgtgtgcttggaaagtcttgaaaaacggaaggttacgttaaagcaatgcgaggcaactgtctgaagcggcagcgagtttgccgagcattgctttgtttttagtaatcttttcgtttttcttagtctttcctgtatacagaacccggagcctgcatcaatccctcaatgtctgtctgttagaagaaactttataagcgctatctgatttcgtccgaacttgaaaaagaatccctacgacaaatctttatttcccggcaatttatagaggaaattccctcatcattttcccacaaaaagaacaatgtcatataaaatgttacatttttcacaaaagaaacctttctggtgtaaagtttttgtaaaacaagtgtcttgtcacctgtaaacgacagtgttataatgggcaagaataaatcaacagagcaatagacatgaaagtgtgttacagcagaattttatgtcaggagagaataagagaggtacgtgctatgacgatcagagaagagatagaacagttaaagaaagaaaaaaatgccgtaattctggcgcattattatgtaagaccggaagttcaggagattgcagattatgtaggagattctttctatttaagcaaagttgcggttggtctgaaagagaaaacaatcgtgttctgcggtgtttcattcatgggcgagagtgcgaagattctgaatcctgagaaaacagtgcttatgccggatatggcagcagattgtccaatggcacatatggcatctgcggagacaatcgagaagattcgttcagagtatgatgatcttgcagttgtatgctacattaattcaacagcagaactgaaaagacattctgatgtctgtgtaacttcatccaatgcagtgaagattgtaaaagcacttccgaataaaaatattttctttataccagatcgtaaccttgcacattatattgcaggattggttccggaaaagaacttcatatataatgaaggcttctgtatcgtacacgaatacatggaggttgaagagattcaggaagcgaaagcagcacatccggaagcagaggttctctctcatccagaatgtccggcaaaggttctggaactttctgattttgtcggaagtacttcagaaattatcgcgcaggcaggaaaatcagatgcgaaagaatttatcatctgtacagagagtggtgttttgtatgaacttcagaagagaaatcctgagaagaaattttactttacagagacaactccaatctgcagaaatatgaagaaggttacacttgagaaagtgcttcatgtattaaagacaggcgagaatgaagtttttgtagacgataagcttcgtgaagaatctaagaaaccgttagagagaatgttagaactggccaagtaaacagagggcagataggattgacagcaatcgaagatcaaagaaaaataatgagatcaaatcgacagtcgctgccggaatggagatatttattatgaaaatggaagcagatgtagttattgtcggaacaggtgtgggagggcttttcagcgcactgagtcttccgagagatcagaagatcatcatgattacaaagtcagatttagagagcagtgattcattcctggctcagggaggaatctgcatgctgcatgacaaagatgactatgacagttattttgaagatacaatgaaagcgggacattatgagaacagaaaagaatccgttgatcttatgatccgcagctcaagagagatcattcatgacctgattggctatggtgtagatttccaaaaacaggaggcagatgagtctggaaatgaagccgcagacaacggtggtgaaaaggcagagattcaggatatttatgcatttactcgtgaaggagcacattcacgtccgagaattttgtttcatgcagatattacaggaaaagaaatcacaagtaaactgcttgcacaggtaaagcagctttctaatgtaacattgattgaatatacaacaatgacagatatcattgtggaaaatgatgaatgtaaaggaatcattgcacaggataaagatggaaatgaattcgaaatccatacagagaatacaatctgggcaagcggtggaatcggtggacgctataagcattctacaaatttcccacatctgacaggagatgcacttactatttccgaaaaacacggaatccgtttagagcatttagattatgtacagatccatccaacaacattgtattccaagaaaccaggaagacgctttcttatttcagagtctgtccgtggggaaggtgcagttcttcttaacagcaagaaagaacgtttcgtaaatgaacttcttccaagagatgttgtgactaaagcaattcgagaagagatggaaaaggaaggcacagatcatgtctggctgtccatggaaaaacttggaaaagaaaccatcatgggtcatttcccgaacatttatcagcattgtctggaagagggatatgatgtgacaaaagaatgtatcccggttgttccggcacagcattatttcatgggtggtgtatgggttgactcagacagcaaaacatccatggaacatttgtatgcagtaggagagacaagctgcaacggtgtacatggtgcgaaccgtctggcaagtaattcacttctggaaagccttgtatttgccaaacgtgcggcaaataaaatctcaggtacagagaatgaagtaaaagtacgtgaattggcataataatagtgatataatattaatctatgctgaaaaaataaaagttaagagaagagtagagaaagaatatagaaacagggacaggagatataaagatgaacgaaattacaatgacacttcaggcagaccatttgattcttgaagcactcaaagaagatatttcaagcgaagatgtaacaacaaactcagttatgaaagactatgtaaaaggtgaagtagaactgatctgtaagcaggacggtataattgccggactggaagtttaccgcagagtatttgaactgttggatgcagatacaaagacagaactttactgcaaagacggagacgaagtaaagaatggtcagctgatgggaaaagtaacaggagatatccgcgtacttctttccggtgagcgtgtagcactgaactaccttcagagaatgagtggaatcgcaacttatacacattccgttgcaggacttcttgaaggaagcaaaacaaaacttctcgacacaagaaaaacaacaccgaatatgagaatcttcgagaaatatgcagttcgtgttggtggcggttacaaccacagatataatctttctgatggagtactcctgaaagacaatcacatcggagctgcaggaagcgtaaagaaagctgtcgagatggcaaaagactacgcaccatttgtaagaaagatcgaagtagaagttgagaatcttgagatggtaaaagaagcagtagaagccggagcagatatcatcatgcttgataatatgtcaacagaagagatgcaggaagcaatcaagatcattgacggaagagcggagacggagtgttccggaaatgtaacaaaagagaacatcggacgcctgacagctcttggcgtagactatatttccagtggagccctgacacattccgctccgattcttgatatctcgatgaaaaaccttcatgctgtagagtaaaagtgatataattgttaaagaacaattattagtatggatttcaatttagaaaggaagaggcatgatgacaggaccagaaagaagaactgccattataaatcagataaagacaagctcagcaccggtgccgggaaaggcattggctgcacagtatgaagtaagccgtcaggtgatcgtgcaggatatcgcactcatccgtgccgcaggacatgacattatatctacaaacagaggatatattttgcacgaatcacatttagtagaaagaatcttcaaagtgaaacataccgatgaccaggttgaagatgaactctatacaatcgtcgatctgggcggaagagttcggaatgtgatggtgaatcacagagtctacggtcatatggaagcatcactcaatattaattccagacgaaatgcagtagagttcatagatgacatccgaagtggaaagtctacgccactgaaaaatatcacatccgattatcattatcatgtagtagaagcggatagtgaaaagacattggatatgattcaagaagcactggaagaaaaaggatttttgctggagcaagaagagtgggagaaagagctttttgcacaataaagatttatcgtggagattctttttcgagtgcggacgaaatcagatagcgcttataaggtttcttctaatagacagacattgagggattgcttcaggcttcgggttctgtatacaggaaagactaagaaaaacgaaagattactaaaaacaaagcaatgctcggcaaactcgctgccgcttcagacagctgcctcgcattgctttaacgtaaccttccgtttttcaagtctttccaagcacacagaacagtcacctgaatcaatccctcaatgtctgtctatcggtaagttttcagtgctatctgatttctgctctctcgaaagaagaactctacttgagaagtagacgcaccggatgttctatagaatgatacccatttcttaagcgtatttactttaataaaatttagcgtagaagacgatcctttttcagtaaacagaaaacagaaaatatgaacttcgagaagtttatgttagaaggatggtacagggacgaagacgaatgtggagcatgcttgctcatacttgaaaaacaatggattgcgttaaagaaaggattgacaactgtctgagcggcagcgagtttgtcaatcctttctttgcttttagcagtctgttgtttttcctagtatgaacagtatgcgtaaccctgagtcggcgttcctgtaccatccttctaacaagcgattttctaaaataatattttcagttttcgtcctcatatccgaaaaatgatttctacgataaatctttatttcgtcccctatatcccttgacatctccctttttattctgcaaaatagtaagaagagtctttcgagattctacttattatagaagaaaaagaggtcatttatatggaagaaatcatacagtttttagctgggattttgaatagagagtttattcgtgcggtgtttagtaacccgcgagtaaaggataatgtagttaaggcaaagcttcgaccgacggaacagaagggggagcttttatttcagttagagtcttttacaaagacgcaggcatttcataagaatctgacggtagaagagacgaaggatgagcttgcgaaattgttggaagagtttcgtcaggttcaggttgagacggtgagtgaggatatcacagtattgatcagtaagaaaggaaaggcgacgattaagagaaagcgcaagaaggtgcaggcaaaggctgcggatctgtctcataacaggaagaaaaaatatattctggaggaaggaattgcagttccgtttcttcaggatcttggagttatgacacaggatggaaagattgtgcggacgaagatggataagttccgtcagatcaatcgtttcctggagtttgttgaggacattctgccgcagcttgacaaggacagagagcttacacttctggacttcggatgtggaaaatcatatcttacatttgcaatgtattattacttacacgagttaaaaggatatgatattcgtattatcggattagatctgaagacagatgtgattctgcattgtaatgagctggcaaagaagtatggatatgagaagttgacattccttgttggagatattgcggattatgaaggtgtggatcatgttgacatggttgtgacgcttcatgcgtgtgatacagctacagattatgcacttgcgaaagcggttggctggaatgcgaaagtgattttatctgttccatgttgtcagcatgaggtgaacaagcagcttgaaaagcagagaaatctgcattcaggcaagatgaaatcgaagacggaagttatgggagtttcagaaatgctgggagatcaactagcttccatggaagaagtgctcggaccaattatggattatggattgttgcgagagcgttttgcagcacttgtgacagatggacttagagcaaagcgtctggaaagcgagggatatgaaactcaggtattagaatttattgatatggagcatacgccgaagaatattctgctgcgtgcagtgaaaaaggggagtcctgcagcaaagagcagaaaagaggcagaggattgtgaaagatttttgaagattcagccaacattaggtatgcttctggcagagcaaaagggagataaataatgaaaaaaatggtaataaagattgccgcactggttgttctttttgcggctgtgctggtgatcagtaatgtgatactgaaccgtggaaatgatgatcaggttgtggatatgggagatgccacactgccgagagtctcatttatgatggggggacagaagataaatgcgttgtctggttatgtagatgatatggatattgtcgcaatgcgagataccattacaccattagagagtgatggtacactgaagatgcagattgagaaaaatgataaccagatccgtgagatcagttacagtgtatattctctggatggaacagagacatatgataaaggaactctaaagtctgcagaaagcgaagatgtcacattaaagctggggaaatcacttggagataaaatccaggaggcagtacttcaggtttcgcttgtgatcggcgaggagaaagaggcaaggaaagttaatttctataccagaattgagaaagcagatgatattacagcatcacaatgtcttacatttgcacaggattttcatacgaaagcatttaataagacggatgtagattcattgaatatttatctggaacctggagatgagagtgataatacaacttatcagacagtcaatatccattcagatatttctcatattcagtgggggactatgcaaccacagttgcttggtgatgtgcggtggagcataaaggaaagtaatagtgtgtatacctctcttcttgcgaattacagagtttcctgcgtggatgatgccggtgaaaatgcagtgtatgacattaaggaatttttccgtgtaagaatcgcaggaactacaatttacctgttggattacaatcgtgatatgcaggaagtattcagtgagaacagaagtgtgatcgatgaagacggaattctgctcggcgttacaccttcggatgttccgtatgagacaaatgagaaagaaacgattgcagcatttgtggagtccagaaacctttggatgtacaataagagttcgaatgaattattaaatattttcggatttgcagatgcagatacgacagatgaaaggaatctgaatgatcaacatgcagttcgtatcatcagtatggacaacagtggtaatcttgcatttgctgtgtatggatatatgaatcgtggagaacacgaaggagaagtcggtgtcggaatctattattttgatgtagagagaaatctgattcaggagaaagcatttataccaagtaagaagtcctatgcaatcgcagcggatgagcttggcaagatggtttattataatcatgcggaagagcagttatatgttttggcagacggaactttgtatcaggtagatctgaaaaagaataaacagacaacacttgcagagaatcttaaagaaggacaatatgcggtttctgatgatggacatctgatggcttatgagtcagaggggaacaaaaaaggtggaacagagattcaggttatgaatttgagcagtctgcatacttatatagtcgaggccgcagaaggagaacagatcagcccattaggatttgtcaatggtgactttatttatggaaaaatgaaatccgaggacgcaggaaagaaagcttccggagaatcgatcactccaatgtatgaattggaaatccgtaattctaagaacaaaaaagttgccagctattcctttgttgataaaggcatttatatttctgatattttaattgatgataatatggtaacactgaatcgtgtagagaaaagcggggatatttacaacgttacttcacaggagtttattacgaataatgaggaacgcaaagatacggcgattaaaacagaagtatatacaacagcactgatggaaaaacagatgcggattacatttgcagagggagcaggagataagaatgtgaaagtgatccgaccgaatcagctggcatcaaagaatgaacttgagatggttcttgctgatagaagcgaaagtgtgaaatactatgtctatggggtcggtgaactggcaggaatttacgataaagcttcttatgccattcagaaagcacagcagatttcaggagttgtgatctcttctgaccagaaatatgtatgggagaaaggcaatcgagatcttgcgtattcgatagaggatgttgctctttcgaaggaaggagaagagacatcacttgaagcatgtgagcgttatatgaagacatatgatgctcagaaagtagatctgacaggatgtacgctggatcaggtactctacgtgatcaatagaggatgtccggtgattgcacttacaagtgcagatcatgcaattcttctgacaggatatacgaagaatgatattacttatatcgatcctgaaaatggagagtcgcagacagtttccatcagcgagatggaaggaatggtttccggaagcggaaatacatttattggttatatcaaatagaatatgtaactgttcagagccaagcaaaatttcaaaaacaggtataaaatgcttgcatttttaaaactgtttttgaaattttatttggcggatacgccacaccgacgaaatgcgtagcattttggaggttggctctgaacagttactagaaaatggaataaaaacgacaggttcttcaatagttcaaatgaagatcctgtcatttttaggttacataagaaaaatctataaagcttttttaaagataattccttgatatttgttaagtgctccgtaaagaatcagaccaagcacaccggcggaaatcacttctccgacaccaactgtcagcatcatgaaaggaatcggaagtggaaccatgtaagcgtattttaatacaaatggaaccacgatgatgttggcaacaaccggaggaacaggggcaaggaatttgctcttgtttcttaaagaccatgtaaagatggcaccgatcagtgttgcaaggctgccgaagataatgtcaggcaggattgcacctccaagtgtgtttccgatgaggcatcctacaaacaatccagggattgcagccggagtaaataccgggaggatcgtcagtgcttccgcaaaacggatctgcacctctccaaaagccagtgatgcaccgacaacagtcagtacgacatagatggcagcaatcatggctgcctgtgccaggtaaagcactttgttacttgagtttttcattattcagttctcctttagttttgttttacgagtggaaggtcacgaacactcgattcattttcgcgcagcaatgagtcaggcggccatgattgcatggacatttgacgaatgccgcggaaggcatatacagtaagtatatgaccttacgccggaaatcggcgaaacccttgtaagaccttggttttttagggttttgtaacgggtgatagtatagcatgaaaagacaagaaaagcaaggacatacccactttctattaaaattgcatattgtattgttaaattgcatatgctataatgccagtaggcaaaaagataatgctattccatagtgaacagcaacgaaaaaccctcggagtgccatccgagggtttttctattcctaattcttgtgtggaaagtttttttatcttaatgaaaaattaaacttaattaagaagtctaaatctactgtaaccaggccggatatgatagactatgagttgtgtaaaatataattcgtggaggggaaaatgagtagaatatacaacgccctgattgaacttgttgcagccgcagtttttataattccgctttggtgcatatatgagaagattttctttcagagctggaaacgaacgatggtttatctgatatttggattttatctggcagtagtattagcattagtgggattcccgaatattacgatgctgcaaatggagcttacagtgaatctgattccgtttatttatatgttgtcagattttgttaatgcgtgtttgaacgtactcttgttcgttccgtttggtttctttttaccaatgttatggaaagagttcagaagtataaaaagtgttgccctggccggaattgttgcaacgtcttttattgagatttctcaactttttactggcagagcaactgatatagatgatatcattacaaatagcatcggtactttgatcggctactttattgtacgttttgtaacaaaaaactttacaaagcgaactttatcagattcaaaaattaatgatttttatttgatctgtggttcagtaggtgttattatgttttttttacagccatttgtctcaacatggttatggggaatacttttatgataagcccggatatcagtttcaataaggagtgagcgaacatgacattacagcaattaacctatttagttacggttgcggattgtgggaatattacggaggctgcagaaaagctttttatttcacagccgtcgcttagtgcagcaattcataatcttgaaaaagagatgggagtgactgcatttacaaggtctaacaaaggcgttactgttacaagagaaggcgaagagctattgtcctttgcaaggatgctcttagagcaggctgacaatatgaaagaacattttggaaatggagagagaagaacaccaaagttttctgtgtcttgccagcattattcgtttgcggtaaatgcttttgttgatctgatcaaagaatatgatgcagaccagtatagttttattataagagagacacagacgggcgagatcattgaagatgtggcgagcggaaaaagtgagattggggttctttatctttcggaacacaatgaagatgtgattttgaagctgataaagaataatcagttgaaatttgaggaaatgtttgttgcagaaccgcatgtatttatctgtaaagatcatccactggcagagaaagaaatgatttccatggaagatttacgaccatatccatatcttgtctatgagcagggaaacaataattcgttttatttttcagaggaatttataagcatgcttgatttcccgaagagtatacaggtaagagacagggcgaccttatttaacctggtgatcggattaaacggattcacagtaagcagtggtgtgatcgaccagaaattaaatggaagcagtattatagcgaagccattagatgttgataaaacgatgaggatcggtattattaaaaagaaaaatattattttcagtcgttatgcgtcttattatgtagatgcgctgaaaaagcatttgtaaaaaataaagagcagggatttcgtcataatgaaatccctgcttcttcttttactagcagaagaattcttttgcagctcgtaccagatactcagtatctttcacacctgcagtttcataaggggaatgcattgccaactgcggaagtccgatgtcaacggtattgagcgcaacctgagtgttggaaatatttccaagggtagagccaccggccatatcagaacggtttgtaaatgtctgaaccggaacatctgcccgcttacataggtcacggaacatggcagcagatacggcgtccgtacagtacttctggtttgcattgaatttcaacacgattccttcgttcaggtaagggcggtttgtcggatctgctttctctgtatagtttggatgaaccgcatgagcattatccgcagagatcataaagctgtctgcaagatgaacacgataatcttctccatcatatccaagtgcttcgtgaacacggatcagtgtgtcaaaaaggaatgtggatgcggcgccctgtttcgtaccgcttccaacttcttcattatccagaacacagtgtacagccatacagtcttttttctcaccggaaagaaaaccttgaagtgatgcgaaggcacactgcaggtcatcaagtctgccgctggaaatgaattcttcagaagccccccagatggaaccttcctgtcggttataaaggaatagatcatgaccgagaatttcatctttttctaccccggcagcttcagcaatctgttccataaaagttcccttaggagaaccacagccataaagtgggagaagatctttctgtgcgttgtagttgtaaccgctattgatctcacggttcatgtgaattgcgagattcgggatcataacaagatcccggtcaatattgacgagtttgctcgtgaattgtccgtttgtcttatcttttattataacgcgtccggcaacagagagcggacggtcaaaccagggtgcacagagcatgccaccatatttttctacatttaatttcacataatgtttttctacttcgatctccggattctctttgatcttaaaggtcggagaatcactatgacttgtcagaatgtgcatcttgtcaataccattttccggaattgtaaacgcaatcagggaagagtcatttcgtgtaacgaaatagtgcccgccacgctctatcttccagcgttcattttcttttaattcagtaaaacgagctttgagaagttcgtctttcatctgtgcaacagcatgaaatgctgtgggactcttttgaagaaattttaatagttcttgagaaactgaattgttcatagatatttccttctttcaaattgttttaaaaatctttttttgctgatatatttactttttaggatagggcaaatcagagagaaatacaaggcggaaaagcataataaaaactttttatttaagaagaatttcacaacatactgttttaaaatgtgctataatctaatttggaatgtcagagattccattggaggagtacgaatgaaaaaaatatctttgaaaataaaattaacactaaaatatacagggtgcatattcgtggcaacaggcattgcgttgtttcttgctacagtgataagtggaacagatgcgcagtcagcaaaagcgatggcgaaggtggtacttccaatcgttttcatcgcatctcttgcaattggatactttctggtaatggaggttctgaaacggactgcagatctggcagagtcagcggcggaaatctgtagaacaaaagatttctccagacagttggaactggaagaatctgatgcggaatttgagagactgcagctgacattgaatgaattacttgaggatgtgcgcgaagagggacattttgcagaaaatgttgtacaggagatgtggatgccggtcagtgtgattcttacaagaagcgcatggtgtcttggcgactggcgactgtcccagcgtcagcgttggcagattgaattagtgcagaagaaggcacagattctttcagattttattcaggaagtctcattttttgcaaaggcggatcagggatgtcagccagcttataaaaaacgcatgaatatcagtgaactgacaacaggaattatagaaggtcagatcagcagacttcaggaagcagatgaaccggtgcagatagaatatgagattgaaccggagatttacgcagaagtggatgagaactgttatcggaagatgctgttaaatctgctggagaattccattgattatagtcgagagattggactgatcaaagttgttgttgaaagcaaaggcagtgagtttacctgtaagattgcagatgcgggaattggaatttcggagacggatctgccacacgtatgggatcggtttttcagaggagatcctttaggtgccggagaaggtcattttggactgggactttctgttgtaaaatggattgctgaagtacacgatggttgggtagatgcagaaagtattctgggatccggaagctgctttacagtggggatgccgtgtgaaccgaagccggaacctgaagcggaagaagtgactgaggaagagaagacggttgatgcgctgttagaaggaattgctggaacggacataacagaagaggagacggatgcagatctgactacagaagcagaaggagcagttgagacagatgcaactacggaagaagctgagacagaagtaacatctgaaataaatgaaacggctgagacagaaggagttacagaaataagtgcggcgactgaaacagagtcagtgaccgaaaacagagatagctcagaagagtccgaaactttgggtgagacaatcgcgatgcctgtgattacagaggacacagaggaacagtcatcagagaattttgtgccggatgcagagaaagatgaaaccgatgtaaagagtgaaaattcgttcaggaaaatcaaaatttgtttatcaaaaatcaaaagctttcttgaggaagaagatgacgaagaagatgacgaagaagattcagacgaagacgaagaagctttaaatgaatgcgaagtgattccatttaaaagcaaagaggattcagatgaaaaataaagaggaggacttctgacgtgaaagacgtagcaacaatgaaggtggaattaaagaaacttattgatacagctgcaggaagaattccggcagatctggtgattaaaaattgtaagattgtaaacgtattttcaggaaagatccaggaaggagacattgcattttcaggtaatcagattgcaggtatcggtgagtatgaaggcgtgaaagtgattgatgcagaaggaagatatgcagcgccaggatttatcgacagccacatccatattgaatcttcttatgtaagtcctgaagagattggacgcctgttagttccacatggaggaacaacaattatggcagacccacatgagatcgtaaatgtatgtggaatcgctggtctggactatatgatgaaagcagctgagaacacagtgcttgatgtgaaatatgagctgccatcctgtgtaccggctacaccattcgagcattcaggtgcggtgatcgatgcagaagcaatgaaagagccgatcacaagagaaggaattgccggacttggtgagttcatgaatttcccgggtgtgatcaatgcggcagacagtgatctggataagatcattgtagcaaaacaggaaggaaaatttattgatggacatggacctggaatcacaggaaaagagctgaatgcatatgccgctgcaagaatcgcagcagatcatgaatgttctacagtagaagagatgaatgaccgtctggaaagaggaatgtacattcttctccgccagggttctgcatgtcacaatcttcgcacactgatcaagggaatgacagcagagaacagcagaagatgcctgctctgttctgatgaccgtcagccgaagacaatccttcacgaaggacatcttgataatcatctgcgtatctgtgtagaggaaggtcttgatcctgtgacagcaattcgtatggcaacacttaacgcagcagaatgctttgacctgaaagacagaggagcaattgcaccgggataccgtggggatgttgttcttctggatgatctgaaagatttccatgtaaaccgtgtatttgtagaaggtacgctggtggcagaagaaggaaaatatctgccagagatcaaaaaatgtgatatctcttctgttaagggaagtgtgattgtaaaagatttctccaaagagaaatttaaaatgaatttgaaatcaaacaaagtaaatgtaatcaagattcttccgggtggagttgtaacagcgaaagatacagcagagattgagttggatgcaaatggagagttcgtaagaaatccaggagttgatcttgtaaaagtagctgttgttgagcgtcatcagggaacaggaaatgtagcttgtggattcctgaaaggatacggaatcaaagaaggtgctgtagcactttcagtggctcacgattctcataacatcattgttgttggagttaatgatgaggagatggaatttgccgtgaacagtctgatcgagcaggaaggtggtattgttcttgtgaaggaaggaaaagtgatcgagagcatgccaatgccgattgccggactaatgagtgatcagagtggtgagtgggtagatcagaaactgacagatattcacgagaaagcatatgaagaacttggaatctgtggagatgtggagccggtaatgacactgtgctttatgtcacttgcagtaattccggagattaagctgacagatatgggattgtttgatgtgacaacattttcattcattcctgtagaagttgaataatgaagttaaaaatcaaagaaaacaccattgacgtactgcatgtattttgctatactttaatagttaaataaatacggcgcagtagccaagcggtaaggcgtgggtctgcaacaccctgattcaccggttcaaatccggtctgcgcctctgaagaacctgaaactgatttgtttcaggttctttttttgagcacctacgccaacaatctcagagatagaaaaaactcatgtgagttcgttagaagagattcacatgagtttttctttaaaacagtccttatttattttcccagttctttttataaatcagatacagcggaagtccgacaaagatcataccaccgagcatatttccaagtgtaaccggaataaagtttgcaaggctgtgaagtggtgtcagtgttgcaatctgttcagctgtaattccgtaagcttcttctgctttcgcaacataagccggattaagtgaagcaaggataccagccgggatatagaacatattggcaacgcagtgttcgaatccgccgactacgaaggcacagattgggaagaaaattgcccataccttaccggcaatatctcttgcggaagtagccatcagtactgcaagacataccaggatgttacataagattccggaagtgattccctgcagtggtgaaattgcgatctttccaacagcaactttgattgtataagcaccgagaagtccgcctgagtagttcaggtttccactgtatacaatgagcagatccacgcaaagagcaccgatcaggttactgaaaaatacgatgaaaagatctcggaataatccgccccatgtgacacgtttgtcaaatacatccatgatgatcagacagtttccggtgaaaagttcgccgccgagaaatacgatgagcatcagtccgacagggaagatacatccggcaagagctcttgctacgccaacattttctactgcgtgtgctgctgtgctgcttgtagcaccgccgaaagcaataaacgcaccggccatgatgccgagcagaatcatttttccaagtggaagacgggttttgttctcgcaggccttgatactcagatcaatgacttctgcgggagtgttaaaatgattgtccatgatataactccttattcttttgtaattcggcagctctcctgctgtgaatggtaacacagtaagagaactgccgttgttatattgctattcgtcaagaatttaacgagaatattttatactagaaaatattggatttcaagagtggaaaggcatgtttatatatagatacaaaattcgggatttttattgctttaggacagttatttgtacggtttataagcatccgtaagcaatagtaattatgcaaaatatgtttataaagttattcacctggaaaattttagaaaaatattgttttgtgtagaaaaaagatatcctcattttatcaacaaaaaagatgagttacgaacaaaaaacacattgaaatttcaagtgcatcaaattattctatatctacttctggccgggaataaaaaacagaaggagaaacactatcggatatctttttccaggggagcgtagtgcatgttgttcggctgatatgttattaagacagtataaaagagtaagaagagaattaggaaaaaagtttcattatcgagacataaaaaaagtatatacgatagttctatttgaaaaaagtaatagtgttttcaagagtttttcaaaggacatttatattcatcggtttcagcaacaaagtgattcaggaatagaactgaaccttttacaggagtacacgtttatttgccttgccatttttgatgacatcattcacaatgaaggcagaaatgcaggagacgaaagcggagaaagaatcgctggagacagagatgcagagaacaaaagatgagatggaagctgaaagaaaacgtgctgaggaggcggaaaaggaactgatccggttgagggcagaactggaaaaactgagaaaatagatgaaatacatagtgatatcagttgtttcttatttactctgcgctcctggagtgttataataactgttaagactgccgggaggcatctgtttgaagattttgataatagaaaaagatagaagaattatttgaaggagtaaatggtatggaactgacaacaattcgtgagttatttaagaacagagaggcatatctggacaaagaggtaacagttgggggctggattcgaagcattcgagattctaagacattcggatttatcgtattgaatgatggatcttattttgatacattacagattgtatatcatgataagatggagaacttcgctgaagtttccaagctgaatgtaggggcagcaatcattgttaagggcacactggtagcaacaccacaggctaagcagccatttgagatccaggcagaagaggttgtgatcgaaggagcatccgcaccggattatccactgcagaagaagcgtcacagctttgagtatcttagaacaatttctcatctccgtccgagaacaaacacattccaggctgtatttagagttcgttctctggcagcatatgcgattcaccagttcttccaggacagaggatttgtatatgtgcacactccgctgatcacaggaagtgactgtgagggtgcaggagagatgttccgtgttacaacactggatatggataatgttccaaagaatgaggatggaactgtagattatacacaggatttctttggaaaagagacaagccttacagtaagtggtcagcttaacggagagacttatgcacaggcattccgtaatatttatacatttggaccgacattccgcgcagagaactctaacacaacaagacatgcagcagagttctggatgatcgagccggagatcgcatttgcagatcttgaagatgatatggaactggctgaggctatgttgaagtatgtgatcaactatgtacttgagaatgcaccggaagagatgaacttcttcaactctttcgttgataaaggacttcttgacagacttcataatgtagtgaactctgactttgcgcgtgtaacatatacagaggcagtagagatccttgagaagaacaatgataagtttgattataaagtatcctggggatgcgaccttcagacagagcatgagcgctatctgacagagcaggtatacaaacgtcctgtattcgttacagattatccgaaggaaatcaaagctttctatatgaagatgaacgaagatggtaagacagtagcagctgtagactgtcttgtaccgggaatcggagaaatcatcggaggaagccagagagaggatgattatgacaagcttcttggaagaatgaaagaacttggacttaaggaagaagattatggattctaccttgatctgagaaaatatggttctacaagacatgcaggattcggacttggattcgagagatgcgtaatgtatctgacaggaatgtccaatatccgtgacgtcattccattcccaagaacagtaaacaactgcgaactgtaataatataaagaagttttagagtgttattcacacatgaacagtaaagtgtgtggataacactctttttttctatatcgaatgtggaaaaccagtccggtttatcgtttgaagtgaaagactgcaaagaataagaaagttatagataactaacctggttttaacattatttaaaagggattttaataaaattttcgctatttaacatagatttaacataacttcacagagttttttataaagccatgataatctcggatatgtaaagaagaaaaaagcactgcgtttgaaaaacagatgcaagacagtgatttgtaattgaaaacagacatgagagaggatctggaggaagaaaaatgaaggaaaacatacagattgttttcgggctgcttggtggcctggcggtttttatctatggaatgaatatgatgagtgaatgtcttcagaaagcggcaggagaaaaaatgaagaaaatcctgtcacttttaacgagaaatcctgtaatgggagcacttgcgggaatgcttgttacagccgtactgcaaagttcaagtgcaacgacggttatggcgattggttttgtaagtgcaggactgatgacactgccacaggcaatttctattatttttggtgccaatatcggtacaacaatgacagcacagctgattgcatttaagttaagtgactacatttatgcaatcatttttattggatttatcgtatattttatctctaaatcagaacgtgtaaaaaatattggtatgacgatttttgcgttcggtttactgttccttggaattgagacgatgggaacagttatgaaaccattagcatcaagccctattttcacagaactgatcggcaaagtggcagacattccgattcttggagttgctgttggtgcattaatgactcttgtagtacagagttccagtgctacaatcgcagtgctccagaattttgcggctcagccgggagctgatggagtgacaagtatcatcggtcttgcaggtgcgatcccgattctttttggtgataacatcggaacgacgattacagcacttctcgcaagtattggtcagccaaaggatgcgaagagaacagcacttgcacactgcatttttaatatttcaggatgcttcctgtttatctggttcgtaaaaccactggcagcgtttatccagtatatttcccctaagggaccggagattgaagtgatttcaagacagattgcgaatacgcatacatttttcaaccttgtgatgacgctgatctgggtaccgcttgttggagttatggtgaaaatcgtaatgcgtctgatcccggacggagaagtgaaagaagtcaatgcagtgcagccaaaatttcttgataacaaactgatcagtcagccgacagttgcattacagcttgcagtaagagaattgatgaattgcggagagcaggtaggcgtgatgctgaaaaaggcagcagaaaagattgatagtggagatggtgcttctgttgaagaatttgtaaaaagcagagaagtgacagctgaacttacaggaaaaatcacagattatcttgcagaaatggcagcggctggggttatgacagagcagcaggcagcaagagccgcagagcttcagtatgtattgatcgatattgacagaatcagtgaacttacgaaaaatgtcgctgtttccatgcagacagaaaagcttgtgaaaaaggacaagaagagtgcaaaagaagaaagagtacagttctcacaagaagcatcaaaggatatacagaagagcatggaacttgtcagtgaaatgtacaacatggtcatgaaaatggttaataacgaagaggcaaatgaggctgaaaatcttgtcaagatgaaagaaaagatccgcaagatggacggagatatcagaaaaggacatattaaacgtgtacacaaaggaaaatgtaaggcaggacttacggctgcattcaatgagattctacataatgtggaaagaatcggaaacagctgtgtgaatctggcagatgcggcagaggacggagtgagattcagcacatttttaaaagagacggagtaacgaattttattatgagcaggcaaactttcaatagaagagagtttgcctgttttctatctacgcgaacaacgagccaaagtccgtgcttgcacgagaccttggcgactgtcgcgataacttgagaaactcgcaaagcgtgtttctcatagtttattaaataagagttggtgcctattcatggaaatccttttgatttatgctgataaaagaagaaaaactgtgctaaaatagttgagacaacaagaaagaacagttataatattaatctgttaatagagagaaaaaggaacttttactaatataggaaggaagtagtaaatgaagatagaattaccaaagaaggtattgtttatcattaataatctgcaacttgcaggatatgatgcatttgcagtaggtggctgcgtgagagattctattttggcgagaaaaccgcaggactgggatatcacaacgtcggcaaaaccagaagcaatcaaggaaatatttcgccggacggttgatacaggaatagaacacggaacagttacagtaatgattggcaaagacagttatgaggtgacgacttatagaattgacggtgcatatgaggatagccgtcatccgaaggaagtccgctttaccaattgtctggaagaagatcttcgcagaagagattttacgatcaatgcgatggcatataatgatgatgtccggctggtagatgtgtttggtggaatgcaggatttgaatcatcatctgatccgttgcgttggagatccgagggaaagattttcagaagatgcacttcgtatccttcgtgcggtacgcttctcagcacagctggatttcccgattgaacctgatactgccaaagcagtgaaggagcttgcaccaaaccttaagaatattagtgcagaacgtattcagacagagcttgtgaaacttctgacgtctccacatccggagcgcattcaggatgcctgtgaacttggaattacaaaggtggtccttccagaatgggacgccatggtaggagtaaaacagaatacaatacatcataagtacgatgtggcagagcatacacttcatacattgaagcatgtgaagagagataaataccttcgtcttacaatgttgttccatgatatgggaaaaccggcaatgaagacaacagatgagaaaggaaacgatcatttcaaaggacatgctctggaaagcgagaaaattgcccgtatagttttgaagcggttaaaatttgacaatgagacgattcgcattgtaacgaagctggtctgctatcatgattaccggatggaagcaacaccggcgaatgtacgtcgtgcaatgaatcggatcggtgttgaattattcccatactatctcgcagtgcgtcttgcagatgcaaaatcacagagcacttacatgagaagggaaaagattgaaaatatcgtagagataagaaatctttacaaacagatcctgatggagaatcagtgcgtgactcttcgacagcttgcggtgagcggaagagaattgatggaactggggatgaagccgggacgcgaactcggtgcaatgctcagtgaactgctggaatatgtgctggatgatccggaacggaacacgaaagagaatctctgtaagtacgtgaaagaaaaaatggaaaaagaaaagtagaaaataccggaagaaaaagagaatactcaggttgtccttttcatagattagaaagaaatcgttgtcggttgctgttaaaaccgacagtaaaaagtctggtaactggaaaagaataataatccaggtcaatgggacagggggcagccatgagagaatatgagatggaagtactggaaaagtacgaacttgaagtgaatagcacccggcggatcagaggtgcattttattgcgatacaaaagaagggacgatgcttctgaaagagacaaagatctcggagaggcgcgtccctttattgtatcttattttaaaccgattagaaaagcagggatatctggtggatacacctgtgttcagtaaagaagggaatctggtgcagaattccagagatggaacaagatatttgatgaaaaaatggtatccgggggaagagtgcaatctgaagagagaggaagatattttccgggcagcaagaaaactgggagagcttcatctgggatttcagtggtatgagccggacttgcaggagaaagaaatatttcagaaattccagaaagaagaggtgcaggaaatcccacagaatacacagcagtcagtttgtgaagaaaagaaaatggactggacaaagttgtcaccattgttaagtaaaaatccattggaagaaatgaaacgtcgtaacagggaaatgaaaaaagtgcggtcatttatcagaaaacgggttgcaaaaaatgaattcgaatcctattatctgaagcattatgaagaaattgcatggcaggcagaaaaggtgacagagcagatagagcggtctggttgccagaatctatatgaaagaagtatacgggaaaggaaaatgcttcatggagattataattatcataatgtcatgatccttccggaaaatgaggtgataacaaactttgagcggatgcgaatcggaatacaagtagatgatttatattaccttttgagaaaagtaatggaaaaataccattggaaacaaaaaacaggacaaaatatattagaagcatatgaaagcgtacggcaattaaaaccagatgaaagagagtatctttgccttcgcctggcctatccggaaaagttctggaagacagcaagtgcttattccagatcaaataaagcatggcttccggaaaagagtgtagagaagctgcagacagcagtagaacagacgaaggagaaagaagtatttttgagagaggtcttcgaataaaaaaagctccgcaaaccgcggaaaatgtggatttatcttgacaaacaacagggaaaccgttataacagtacataagggtttgaggcaagttatcgtgcagacttgtaacctgaataaataaaattaggaatagaattgtatttgagtacaataaaggaggacataatccatgaacaaaacagaatttattgcagcagtagctgaaaaggcagagatttccaagaaagattccgagaaagcattaaaggcatttgttgatgttgtaacagagcagctgaaagcaggagataaagtacagcttgttggatttggtacatttgaagtaagcgagagagcagcaagagaaggaagaaacccacagacaggaaaaactatgacaatcgcagcttgcaaggctcctaaattcaaagctggaaaagcattaaaggacgctatcaactagttcaggggattttgtagaagaatatatgagactggataagtttttaaaagtctcccgtctgatcaagcgaagaactgtagcaaacgaggcctgtgatgcaggacgtgtgctggtgaatggaaagacggcgaaagcatctgtgaaggtaacgccgggtgatgtgatcgagattcagtttggaacgagaaccgttaaggttgaggttcttgaactacaggagacaacaaaaaaagaagaagcaaaggacttattcaaatacctgtaaagtctgtcagacaacaggaatctataagtcgatcaatggttattgttttcagtaatcttagaaaggcaaggaatattttacaaagtgagatattccctgcctttctgtatattgtacgataatacgataaagcagttttgaagacacatctataaaacctttatctgtcaggaataagtagaaaagctctgacatatatatagaaaagtacagggaactgttatctggttccagtaatatactgtggggtatgccagagaagagggaggtgcagcggatggaggaacagcaaaagactgtaaaggctcataagctggtggttaataaccggaagacaagtatggtgacaggtgttctggatgtattgtcttttgatttgaatgagattcttctggaaacagagcagggaatgctgttagtaaaaggaacagacttgcatgtgaaccgtctcagtgtggaaaagggagaagtagatttgtcgggaacaatagacagtgtttcatattctaatatttcacaggcaaagaaacaggaagaaagcttttggacaaagatgttcaagtgaggcagaaagaagatgctaaatataaaaaatgaactgcttgtcttcttctgtgcctgtcttacaggtgtgaatgtccgggctgggtacgagatcctgattttcttaaggaaaatgataatacataataatctggtgaaaggaatcgaggatctgttctactggatatttatgagtgcatatattttctcacagatatatgcaactacgtatggtagtatcagatggtattttctactaggtcttgtatttggcgttgccattattcagaaactgatttcgtctggagaaaaaatacacaaaaaacaaggaaaaaccttgaaattattagaaaaaacagatagaatgttgataattgggaagtttatagggggactccgtcagtgaaggcaggattgatttcccggtaacgttaagagtgtattattttagggtgaattttagatggcaaagaaaaaaagagtgactggacggcgcagccatacaaagcagagacgtccgagtccgtacaaaagaagcgttcttatgattttgtcagtattgtgtcttctttccggtgtgctgggagtgaatgcagtaaagcttcatgcaaagaatacagcgtataaacagcaggaagcagaactgaagacacagatcaaaagtgagcaggcaagagcagaagagatcaaagaatacgagcagtatgtacagacagatgattacatgaaagagatcgcagaagataagctgaatcttgttgatccgaatgaaatcgtatttaaaccaatcaagtgaatagtaatcgaatctgcaaagtcagtgaaagacggatacagaattttacgaaagataactccgggagagaaagttctcctggagtttttctttttacgcaaacaacgagccaaaattcgtgcttgcacgagaccttggcgactgtcgcgataacttgagaaactcgcggagtgtgtttttcacagtttgagtaacgaggggggatggaaatggaaaatggacaggtattacatagtagtctatatgtggaacagattgataagtttgcagtttcattaaaacagttagcgaaaacatttttgaaattagaagaaaaaaagcagacattttcagaagaagagattgatgaaatgtttgcctgcgtaagagaagaagtgtgtgaaaaatgtgagaaaaacagttggtgctggggggaaaactatattcagatgtatcagatgggatacgagattcttgcagcagtagatcagtatggaaatgaactggatgcagagacaaaaagaaaactgatgcagcgatgcattatggctccgcggttttatcgggggatgcttgacagttttcacgaagcaagacaaaatatgatctggatcaatcgtatcgcaagaagccgggaagggtgtgcagcccagcttgatctatttgcagatatgctgcaaaatatggcgaaaaatctggaagacagcatatttacagatgaaaggttggggaaacggatcttgtctcaattaaaaagaaaaggaatacgtgtactttccatgcattttcttgtgaatggagagggaaaatatgaattgcatctgacgatgcgcacctggaaagcggaaaagattccggtaaaaagtctggcagggattctgagtaatctgacaggaagaagattgattccgggaaaagaaggggcgcagttgatcggagcggattatacaacagtggtcttccgagaaggaccatcctattacacaatatccggaatagcaagaatcggaaaaggctgcagtaatatttcaggggacagttttacgatgatggatcttccgggtggtaaaaggggagttgcattgtcagatggcatgggatgtgggcaggctgcctgtcgggaaagcacacttgtgatagaacttctcgaagaacttctggaagcgggatttccggaaaagactgcgatccagatgatcaatacaacactggtctgcggaagagaagaaatccattactctacgatcgaccttacagtgtttgatctgtatacaggggaatgtgaattgatcaaggcaggcgcatcctcaacttttatccgaagaaaggatcagattgagcatctgacatcgacaagccttccgatcggagtgatgaattcacttgaaatagattcagtgaaacggcagttgacggatggaacgtatgtaatcatgctgacagatggagtgctggatgcacttccggtaggagagcaggacttccttcttgaaacaatcataaaaggaacggaaatacgaaacccaaaggaactggccagacacattttacagcaggtacttaactggacaggaaaagaaccggaggatgatatgtcagttttggttgcagctttgtggaaatgcagaaagtagtcattgacatagaagtaaccgttaacgtatagttgaggtatgatggataaaagattagaaaagattgaaaactatatcagacaatatcatatgatagaaaaaggggacaggattgtcataggtgtatcgggtggcgcagactctgtatgtctgctgatggcactttgttcattgcaggaaaagctgggatttcaggtgcttgtctgccatgtgaatcatgaactgcgcggggaggaggctgcacaggatgaggcatatgtggaaatgctttgtcataaaatgcaggttcctttttttgcatttcatgaaaatgtggaattaattgcaaaaaagcggaaagaatcattggaggaagcaggcagatatgtgcgaagacaggcatttgaacaactctgtaaagaacagggcgggacaaagattgcaacagcgcatcatagtaatgacaatgcagaaacaatgcttcttaacatggcaagaggaaccgggcttcgcggattgtgtgggataagaccagtgtatggaaaatggattcgcccacttctggaattgtccagggaagagattgaacagtggttgaaagattgtgatatcagatattgtgttgacgaaacgaatcaggaagatgaatacacaaggaaccggattcgtcatcatgtaattccgacattagaagaacaggttaatacaaggacggtagaacattttgtgaagctcagtgaacaggcagaagaaatctatgaatatctggaaaaacagacagatcaggcatggaatatctgtgtaaaacagacagacggacttcaaagcaggaaagaaatatttctcaaggcagaggaaatgaaacaccttgatcctgtgataaagaaattactgatccaaagatcagtaagtgaagtggcaggggcacagaaagatattgaaagcaggcatatcctggcggtactgcaactgtttgaacggcagacaggacggcagatcgatcttccgtatagtgttacagccaaaagaatgtatgagggagttctgcttgcaaaaggtgataaaaaagttacatctgtacatcagaaagagaaaagaaaagaagagagtaattttgttctacagcttcagattccgggagaaacaaagatcccgggaacaaatttgaaaatctgctgtacaatcagcggtgaaaatgagaagaattcagcaaaagcgataccacaaaaaagctacacgaaatgctttgattatgatataataaaaagcagtctctgtgtgagatacagacgacccggagattattttacaattgatggggaaggaaagaaaaagaagctgaagagttactttattgatgagaagattccgcaagaagaacgggacagacagcttctgatcgcagaggaaagccacatcgtatggattccgggcagaaggatgagttcgtactaccaggtgggagaccagacgaaaaagattcttaagataaagattatggaggaatagaacaatggctgagaagattaaagtgttaatttcagaggaagaagtagatgcaagaattcgtgaactcggagaaaagatcagtaaagagtatgaaggaaagcagatccatctgatctgtgttctgaaaggtggagtattctttatgtgcgaacttgcaaagagaatcacagttccggtatctatggactttatgtgtgttggaagctatggcgacggaacaaagtccagtggtgttgtaagacttgcgaaggatctggatgagtctattgagaataaggaagtgttgatcgtggaggatatcattgattccggtaatacactgtattatctgatggacgtacttcgtcagagaaagccggcaagtctccgtctttgcacattacttgataaaccagaccgccgtgtgaaagatgtgcacgtagactggacaggatttgagattccggatgagttcgtagttggatacggactggattatgcacagaagtatagaaatcttccatacatcggagtagtagaagtcgcagaatagaaaggaagcaataaaaaattgaataatgacagaaaaagcagaggtctgagtggggcaacgatcatcagttttgttgtgatccttgttgtggttctgtggatggcgaaccagcttcagatgcatcagcaggagatgacatatacctcctttgtctctgcagtacaggaaaaaaatgtttctgatgtctacatcaatcagaacagtgcagttccgacaggaaccgtctctgttacattgaaagatgatggtaatacaaggaaagtgaatgtgtcagatgttgagcaggtagagaagcttctgacagagaatcaggtggagtacagactttcggatgtaccgaaggattccatgttgacaacagttgtagttccgatgctgatcacgcttggcggcgtattcctgatcttctttctgatgagccgtcagaatggcggggggaattctaaggcgatgaactttggaaagagccgcgcaaagatgagcacgaagaatgagatcaaggttacatttcgtgatgttgcaggattgagagaagagaaggaagaactggaggagattgtagattttctgaaagatccgaagaaatacatccaggttggagcacgtatcccgaaaggtgttcttttagaaggacctccgggaaccggtaagacacttcttgcaaaggctgtagccggtgaggcaggagtaccatttttcagcatttcgggctcagatttcgttgagatgtttgttggtgtgggtgcttcccgtgtccgtgatctgttccaggatgcgaagaagaacgcaccatgtatcatatttattgatgagatcgatgcagtcgcaagacgccgcggaagcggtcttggcggtggccatgatgagcgtgagcagaccctgaaccagctccttgtagagatggatggatttggtgtaaatgaaggtattatcgtaatggcagcgacaaaccgtaaggatattctggatcctgcaatcttaagaccgggaagatttgaccgtgatgtccttgtcggacgtccggatgtaggcggaagagaagagatcctgaaagtccatgcgagaaataagccgcttggagatgatgtggatctgaagcagattgcccagacaacggcaggattttcaggagcagatcttgagaatcttctcaatgaggctgcaattctggcagcgaaggagaaccgggtgtacattcagcagtctgatatccgtcatgcatttgtgaaggtcggaatcggtccggagaagaagagccgtatcgtttctgagaaggaacgcaggattacagcttatcatgaagccggacacgcgatcttgttccatctgcttccggatgtaggaccggtttacagcgtatctatcattccgacaggcggagccggcggatatacgatgccgcttccggagaaggatgatatgttcaatacaaaggggcatatgcttcaggaaattacagtttcccttggcggacgtgttgcagaagaagagatttttgatgatatcacaacgggagcttcccaggatatcaagcaggcaacagcaattgcaaaatcaatgatcacgaagttcggtatgtctgaaagactggggctgatcaattatgataatgacagcgatgaagtattcattggacgtgatttcggtcatacatcgagagggtatggcgaaaaagtggccggaacgattgatgaagaagtgaaacgcattattgatgagtgttatttgaaagcgcgtgcacttattcaggagtatcatccggtactcgagaagtgtgcacaactgcttcttgagaaggaaaagataacaagaagtgaattcgaagcactgtttgcagacagtgaggttgaaggatagtagtcattatatgtatttaggataagataccctctgccggcgggcgatcccgtgttggccgggggtattttggttctattttagaatagttttaagaattgagttaaaggaggctaaacaggtgaatagagaagcactgttttgtgacggtacaggtgattatgtctgtccggcagagcctgagataaatgaaaaagtagtgttgcgatttcgtacggcacacaatgatgttgatgaagtgaaacttcacatcggagaacaggagtatcctatgtggaagacacgtacgaacggtgaatttgacttttacgagattgagtatcagcttggtgaggatatcttaagatattgttttgaaatcaagcagggagcagaaatctgtttttatagtaggtatggaataacagggaaaaaagaaaactattatgattttattatttcgccgggatttaagacacccgagtgggcgaaaggtgctgtgatgtaccagatcttcgttgatcgtttttataatggagatccgacaaatgatgtggaggataacgaatatatttatattggggcaccgagccgcaaggtgaaggactggaatcaggcaccggaagcaatggatatccgtaatttttacggcggggatttacagggtgttttagataagctggattatctgcaggatcttggagttgaagttatttacttcaatccgttgtttgtttctccatcgaatcataagtatgatattcaggattatgattacatagatccgcattatggaaagattgttgtggatgacggagaagtacttccggcaggtgcaaaggataatatccatgcgacaaagtatcagcaacgcacaggagatatccgcaatcttgaggcaagtaatcagttgtttatcaaactggtagaagagatgcataagcgtggaatgcgtgtgattctggatggtgtattcaatcattgtggctcttttaacaaatggatggacagagaacgtatctatgagccgcagccggactatccgaagggagcgtatgtaagtaaagaaagtccatataacagctttttcctgttccatgatgcgagaaatgagctctggccttacaacggaacatatgatggctggtggggacatgatacattgccaaagctcgattatgaggattcaccacagcttgagcagtatattatggatatcggaagaaaatgggtatcaccgccgtataacgtagacggatggcgtcttgatgttgcagcggatcttggattcagtaatgaatacaaccatatcttctggaagagattccgaaaggaagttaaggatgcgaatccggatgtaattatattggcagaacattatggagatccgcaggattggctccagggagatgagtgggacagcgttatgaattatgacgcatttatggaaccgctgacatggtttttgaccggtatggagaagcatagtgatgaatatcgtccggatctgtgcggaaatgctgacaactttgtcggagcgatgcgtcattttatggcgagtatgctgacaccatctcttcaggtggcaatgaatgaactttcaaaccatgaccattctcgtttcctgacacgtacgaaccacaaggcgggacgtgtggcacagcttggaacagaagcagctgaaaaggatgtgaataaggcaatcttacgagaagcggttattatgcagatgacctggatcggtgcgccgacgatttattatggtgatgaggcaggactttgtggattcaccgatccggataaccggagaactttcccatgggggaacgaagacaaagaacttcaggcattccacaaagaagtgatccgtatccacaaggaagagaagccgttgaaaaagggttctatcaagctgttggcttcggatgaaaatctgctggcctatggaagatttgaagcagatgaacagattgtcgttgttgtgaataacagtgatgaacttcgtacagtgaccgtaccggtatggtatgcgggtgtagagatggaaggacggatgaaacgactgatctactcttatgaaaacggttatacgacagaatatgacgagtatatcgtacaagatggagagattgtcctgaatatgggatctcattcagcaatcgtattaaagccggcagaagcattgagattgatgccgtaagaagtggaacggtattttgcagataaagaaagagcattatacaagaataataaaaatacgggatgagcagttttgatatctgttcatcccgtatttgttactattattattttgtaagaacctctgccccattctcagtgatgagaaccatgtactcaatctgggcagaaagaccatcatccattgtataaatagtccagtcattgtcctcatctacgaagaagtcagggctgccttcgttgatcataggctcaatcgtgaacatcatacctggaacgagaagcatctcacttccctttggtgtcacatagctgacaaaaggatcttcatggaattccagaccgacaccgtgtccgccaatatcctctacaacagagtatccgtttgcacgggcatgtgtattgatcgcatctgcaatatcacctaaatgtccccaaggcttcgcagcctcaagtccaagcttcacacactcttctgtgacgcggacgatgcgctctgcacgttccgatacttttcccatcttgaacatacgggatgcatcagaaaaatatccgtcaagaatagtggatacatcaacattgatgatatctccctcttccagaatgatattcttatccggaatgccgtgacaaatctcattattaatagaagtacacacgctcttagggaatccctgataattgagcggagccgggataccaccgtgttcttttgtgaaacgatatacgatgtcatcaatctcctgtgtgctcattccaacgtggatctgtcttgctacttcatccaggatcgctgtattaagctcagcactttttctgatcttttcaatctggaatggagtttttaaaatcttacgtgtcggaacaatctcaccacgttcagcatgcatcattatcttttcttcaatcggcatatggcatttcttatacttcttgccgctgccgcaccagcacaattcatttctttccatgatattacctcttctaaaaatcacttattttctctgtttctacttattttatcacaaaattcgacaaaaagatacatgttatgcttgccgagaacgtaaaaatatagtacgattaagattcagataggagtgataatgcatatgtggtattgggcgattatggtactgctgattttaggaagtatcgcacttctttgcagtacatttataagtgtaaaaaagaataaggcacaggacgcagaacggagaaagcagtccaggaacggaaagcgttacaaggcagatcagggatatgatccagaagaggaagaggatcagccgcagggaaagaagagacgcagttcagggcagaacggttctatggattcagcgaagcgttcttctaaaaaaagaagacagtggaagattatcctggaagatctggatacatggcagaaatatagcttcatattctatgatgaagtgggaatcggaagagcaaagaggaatgacaattatgagaagtatcttccactgcatgaggatggaagagtatccaagcagcactgtgtgatcatacagagaggtgactgtttgtatctgatggatgatggttccaagaatggaacatatctgaacggaatcctggtagatcgtccgacagaggttcagagagaagatgtgattggtgttggggagaccagactggagattctcagaattttaagagaaagtgaataatgaaattacaggcaaggaagtccggcggaaaagtcaggacttctttttcttttagatcgtaaaatgaagaatctgtgtgaaagtaacagttgagtaaggaagatcatatagtagttatatagttactgttcactcccgtgtcaatcactccgctgattgacacggaggatgcgtgttttgatttgaatgcatctcgccccatcgccaaaggcgatttaaaatggcgagatgcgttgctggtcgcacatcgtgtgaacagtaacgttatatagccgccggatttataaactgcaatcaacaggaatgtgaacagcagggacggcacaacttattgtcagtgggagtgagcaacatgtaccagaaattgccttattatatggcctatccgatacagacagaatatgatgagagagcggaaaggacagacctggagtatatgaaaagcctgtatccggatcttccaaagagaatactgccttatgtcgaagaggaatgtgacaggatggaatacacggggagtgtgatatttgatgattatccggataaattgcagttacgcatcatgtgcagcagaatttgcgaaaatgtaaaaaaacaggagaaaatgtttgccggggaagagcggatgttaagaaatctggcggaagtcctgttgtatcaggaaatctaccgacgcaggggcgaacagagaaaaaggaaacaaaaaatttacagttattgttcattgccaggaaaatctatgatataatcattcagattacaacaaaagaaacggattcagaagaagggaacagatacagatgaaaagtaatcttatatttatcggtatgccggctgtcggaaaaagtacagttggtattgtagtagcaaaaagacttggaaaaggtttcatagattcagatcttctgattcaggaacaagaaggaaagcttctgcgtgaaatcatagcagaagtcggtgatgatgggtttttaaaaatcgaaaatcaggtaaatcgtgatataaaagcagaaaatgcggttatttctccgggcggaagtgttgtctattgcgaggaagcaatgaaacatttcaaagaaatcggaattgttgtatatcttcatgcttcttatcagacaataaagaggagaatcaggaatcctcaaaaaagaggagttgttttgaaggacggtcagacattaaaagacctgtatgacgagcgaaaagtcctttttgagaagtatgcagatgtgacaatcagtgaagagggctgtcagattgaagaaacaatagaaaatgtacttgatactattgagaattactctcaaaataaagcgtgaatattaccgtcatagaaaaaggggattccacaatgaaagattttgtgttatagttatgtatggattatattgtaattaaggtagataattcttttcgtatagacaaagacacaagaataaatcgttactgaacacaggatctgtgggaagtaatacagaatcggacaattgaggtgcaaaatggagcaatatattattaagggtggtaatccgctggttggggaagttgaaatcggcggagctaagaatgcggcacttggaattcttgcagctgcaatcatggcagatgaaccggttttgattgagaatcttccggatgtgaatgacattaatgtcatgctggaggcaatcgagggaatcggtgcaatggtacagagaattgacagacatacagtaaagatcaatggaaatacaattggagatttcagtattgattatgactatattaagaagatcagagcgtcttattatttgttaggtgcacttcttggaaaatacaagagagcagaagtggcacttccgggaggatgcaatatcggaagcagaccaatcgatcagcatctgaaaggattccgtgcacttggagcagatgtagacattgagtatggtaagattgttgcagaggcggaagagctgaagggaacacatctttatttcgatgttgtgactgtaggtgcaacgatcaacgtaatgatggcagcagctatggctgacggtcttacgatcatggagaacgtagcgaaagagccacatgttgtagatgtagcgaacttcctgaacagcatgggagcaaatatccgtggtgcaggaacagacgtgatcaagatccgtggagtgaagtccctgcacaaggcagagtactccatcattccggatcagatcgaagcaggaacatttatgtttgccgctgcagcaacacgcggagatgtgacagtactcaatgtgattccgaagcatttagatgcaacgatctccaagctggtagatatcggatgtgaagtggaagaatttgacgatgcagtccgtgtagtggctaagggacgtctgacaagtacacaggtgaagacattaccatatccgggatatccgacagatatgcagccacagatcggggttgtgcttgcactcgcgaagggaacaagtacgatcacagaaagtatcttcgagaatcgttttaaatatttagatgagctggcacgtatgggtgcgaatatcaaagttgaaggtaattcagcaacgatcgagggtgttgagaaatttacggcagcaagagtcagcgcgccggatcttcgtgcaggagctgcgctttgcatcgcaggacttgcaacagaaggaattacgatcgtagatgatattgtttatatccagagaggatacgaacgctttgaagagaaactcagaagtctgggtggaatcattgagaaagtgtccagtgaaaaagagattcagaaattcaaattaaaagttggctaaaccgaggttactgtttacaacaagctgcggccggcagcgagccgatacagacagaatccgaagaaatatgatgtgagaacgtatgcaggtgtcggaacgaaagttctgatacctgttttcagtttatatgtcaggagttatggcgtaataggcaatcaggcaggtcgaatgaaacagtggcgggatattaataagaaaacagcaggagcaacgaacgatgaatgaatttgaacaggcagaagaacggagaaaaagacagagagaagaaatcaaacaaaagaggatcagacagctcagacgaagaatgactatttccggctgtattttgttgtgtgtaatcatagcgctggcagcctttgcagtcaatgtggctaagaaaaagaaactggcagcagaacagaaaaaacaactggagcaggagactgcacagatgaatgaatcgctgaatgactgctacaacactttcctgacagacaatggagtgtcagcggaaaagtctgatgttacagcatttacgaaatggctggaaaagaactattctgaagagatggatgatttatttccagtctatcagaagaataaaaagataacagcgcaggacatttatgattcctttggagcaactttgcatgttctgtcagatacatacgaaggaaaattaaaggatgaagctaccgctgcgaagaatcatatctatgagaagaaggcagcagagaacggaaccgtgcagatcacagcggcaggtgacctctgtctggaggaagatggatatgttctcgattattatgatacggtaaatgacttgtccaaatgcatttccaagtcaattctggatcagacaaatgcagcagatattttcttcctgaatcatgaatattgtatcagtgaccgtggaaccccgctggaggataagtattatgtattccgtgcaaaaccagaacgcatgaagttgctggaacagatggggacagatattgtttcaattgcgaataatcacatttacgattatggtgcagatgcgatggatgatacgatcgatctgttagatcaggcgaagatcactcatgttggaggcggaacgaatctggatgaggcaaagcagccgacttattatatcattaacggaatcaagatcggatttgtggcagcttccgagggagaacagtataaatttacaccggaagcaacagattcaacgacaggtattcttacatcttacgacacaacagagtataatcaggtgatcgcggatgcatcaaaggaatgtgattatctgatcgcatatgttcattggggaacagaagatgaggatatgtataattcaacacagacagagcatggaaaagaattcctgaagtcaggagcagatatcgtgatcggaggtcatccgcatgtacttcagggaattgaatatacagaagatggacctattgtatacagtttgggcgatttctggtttaatgatgagacaaaatatacaggacttctgaatctggagattacatcagaaggactgaagcagatgtcctttacaccgtgtgagcagaaagacagccagacacagtatctgaataatgcagagtcccagagagcactttttgatcacttgcaggagatttcaccgaatattacaatcgatgataccggagtgatcacggagttaaaagatgttgatgcagaatcatagaaatataaaagttttatcaacttcaggaaacggtattgacataatcaacaaggtgttgtatagtctgatacgaaacaaaattaaatagatgatactttctcttattcagagcagtggagatacaaaggatctaagaagctgcggcaacccctcgtaataggaaggtgccaacctgagcgagttatttcgaacaataagaggattgttaagataaactgacagtccgcttgatgcgggctgttttcatttacgcgagcaacgagccaaagtccgtgcttgcacgagaccttggcgactgccgcgataacttgagaaactcgcagagcgtgtttctcatagttattggcaatgtaagcaaatgaagacagcacaagcgagagaaagtgagaagttgctgttagtgcagcaatcggaaaggagaacagatatggaaagagaaaagattttatttacatcagaatcagtaactgagggacacccggataagatgtgtgaccagatttcagatgcgatccttgatgaactgatgagacaggacccgatgagccgtgtggcatgtgagacatgttgtacaacaggtcttgtaatggttatgggagagattacaacacaggcttatgtagatatccagaagatcgttcgtgacactgttcgtgagatcggatacacaagaggaaaatatggatttgatgctgatacatgtggcgtgatcacaacactggatgagcagtcagcagatatcgcactcggagtagataaagcacttgaggcgaaagagaataagatgtcagatgaagacatcgaggcgatcggagcaggagaccagggtatgatgttcggttatgcttctgatgagacagaagagtatatgccttacccggttgcaatggctcataagcttgcacgtcagctgacaaaggttcgtaaagacggaacacttacttatcttcgtccggatggaaagacacaggttacagtagagtacaacgaagacggttctgtaaagcgtctggatgcagttgttctttctacacagcatgacccggatgtgactcaggagcagattcatgaggatattaagaaatatgtattcgatgagatcattccggcagaactcgtagacgaagagacaaagttcttcgtaaacccgacaggacgtttcgtgatcggtgggccacacggagacagcggactgacaggtcgtaagatcatcgttgatacttacggcggaatggctcgtcacggtggcggtgctttctcaggaaaggactgtacaaaggtagaccgttctgcagcttatgcagcacgttatgcagcaaagaatgttgtagcagcaggacttgctaagaaatgtgagattcagctttcttatgcaatcggtgttgcacagccgacatctatcgcagttgatacattcggaacaggaaaactttctgatacaaaactggttgagatccttcgtgagaactttgatttccgtccggcaggaatcatcaagatgctggatctgagaagaccgatctacaaacagacagcagcttacggacattttggacgcaacgacctggatcttccatgggagaagctggacaaggttgacgatttaaagaaatatctgtaagatagaaatatctgatacaagcactggaaggtgcctgacacccgtcataaagtgtcaggcacctttttcaatacggaaaggagatgcttctatgaaattacgtaccaaactgattattgcttttgtagtcgttatgatctttcctgtaacatttgcactgatcgcaatgcatgcatttgttccgggaagaggggcagagatacagcagctgtatctgatcgcagttgtccttacgacagcatttctaatcttgtggatctacagatcggtatcggtcccgctggagaaacttcagagagctgcacgcaatatcaaagagggtaatcttgactttgagatcaaagcagaatcaaatgacgagatcggacaactttgccaggactttgaagagatgcgtctcagactgaaagcacaggcggaagagaaggtcgcatttgacagagagaataaggaactcatcagtaacatttcacatgacctgaagactccgatcacagcgatcaaaggttatgtggaaggaattatggatggggtagcagatacgccggaaaagatggacagatacatcagaaccatttataataaagctaatgagatgaatcttctgatcaatgaactgacgctttattcaaagatcgatacgaatcgaattccgtataatttcacaacaatctctgcgaagggatattttgcagattgcgcggaggatttaagtgtagaactggaatcaaagggagctgaatttacttacaggaactttatggaagaggacagcaaggtgatcgtagatccggagcagcttcgaagagtcatcaataacatcgtatcaaattctatcaaatatacagataagccaaaggtgaagattacgatggatgtaaaggacgtgggagactttattcaggtagaacttggagataacggaaagggcattgcggcaaaggatctgccgaatatctttgaccgtttctaccggacagatgcttcaaggaattcttccaagggaggaagcggcatcggtctttctattgtaaagaagattgtggaagagcacggaggaaagatctgggcaaccagcgaagagggcgttggaaccacgatgtattttgtaataagaaaatatcaggaggtacccgtagaagatgagtaaacgtattttaatcgtagaagacgaggaaagcattgcagatcttgagaaagactatctggagctgagtggttttgaagtcgaggttgcgaatgatggtgagataggacttaagaaaggacttgaaggagaatttgatctgatcattctggatctgatgcttccgggagtagatggatttgagatctgtcgtcagatccgcagccagaagaatacaccgatcattatggtttcagcgaagaaagatgatattgataagatccgtgggcttggacttggcgcagatgattatatgacaaaaccgttcagtccaagtgaacttgtagcgcgcgtgaaagcacatcttgcaagatatgagagactgatcggaagtaatgtagagcagaatgaagtgatcgagatccgtggattgaagattgacaagacagcacgtcgtgtctgggtgaatggagaagagaagtctttcacaacgaaagaatttgaccttttaactttcctcgcaggacatccgaatcatgtgtacagcaaggaagaacttttccgtgagatctgggatatggagtcgattggagacattgcaactgttacagtacatattaagaagatccgtgagaagattgagtatgatacttcacatccacagtatattgagacaatctggggtgtgggatacagatttaaagtataagaagaaagagaggactctgccagtgaatggtagggtccttttttgtatattaggaaagtgctttcctaatatacaaaaaacgctccgctaaggatgcgcactgcggcgtacaatgtagatgtcgcaagcgaccgccgcaggcgcaagaatgtgcaaggcacattctttgttctagaaataataaagatgtcaactcaaataaagaaaaggttgacaatcgaaaaagacatggctatactattttcatatgttgtaaataagatcaacagaataataatgcagaagatgcattggagatatttgaggattgcgggaattacatagcaatggagtaatccggttgcattagtgaatgacaaaaattacttttgagactcatatcatagaaacagaagaaagggaaatataccatgtcaaacagatcaattcatacattactgaaaaactgggatgaagaatgtccgcttacaagagaagaagcagttgaagtgctgaatcttccagaggaggagatggacagtctgatggagtgtgcttatgcacttcgtacaaaatacaaagggaagaaagtaagcgttcagcttctgacaaatgttcgtagtggaaactgtacacagaactgcgcttattgtgcacagtctaaggattctcaggcagagattgagaagtacaagagagtatcagatgaaaagctttatggagataatgacctggtagatgagaaacatcttgcaagacattgtatcggattgagtggaatcggattctcagatgaggagattgaagatcttgcagaccgtatccgcgagatgaagaagaaagatacacagatctgctgctccatcggcttcctgacagagaagcaggcaagaatcctgaaagatgccggattggaccgtatcaaccataatctgaacagcagccgttctttctatccggagatctgtacaacacatacttatgatcagcgtgtgaataatatcaagatgcttcagagtcttggattcgagatctgcagtggtggaattgttggaatgggtgagagtaaggaagatatcgttgatatgctgatggatctccgtgagatcaatccggaatcggttccgatcaatttcttacttccgattccgggaacaagactggcagatcgtgatatctcagagctgacaccggagtattgcttgaaagttctttgtctggcaagactgatgattccaaagtccgatatccgctgtgcagcaggaagagaagtttacttcaagggattggaaccggaacttttcaaagttgttgattctatctttgcatcaggttatctgacagccggaggacagggaatcgatgacacaatgaaaatgataaaagatgcgggattcgatggagagatcgagtctacagatcactaaaaatgtttcaaacctaataatttgtaactgttcagagccaagcaaaatttcaaaaaacagatgtaaaatgcttgcatttttaagactgtttttgaaattttatttggcggatacgccacaccgacgaaatgcgtagcattttggaggttggctctgaacagttactatgatttaaaaacgaaggatacgctgttctgaggacgaatcagagtggcgtatctttcgttttatcagcttttacttgcagatgataaaagggagtggtaacatggtgtttaataattgtcatgtgagagcgaggaaagatagacatgtatggattttatatagatgaagacaggagaaaagcacgaagagcaaaatggaatacagtgaggatcatatcaatcggattctttggcgtgattctgcttggcagtctgctcttatggcttccattttcaaatcatcagccgattcgttatatcgatgcactgtttacagctgtgacatgtgtctgcgtgacaggattggtgacagttgtgccggctgcgcaatttacagtggcaggaaaagtgattctgcttattctgatccagatcggcggacttggaatcattgcatgtacaactgcatttttaattctggttggaaaaagaataaatatgaaggaacgagttgtcattcaagaagcctatggtttgtccacacttcaaggaatgatccggtttattgaaagagtattgtggggaacatttcttgtagaaggaattggcgcaatcggatattcatttcagtttattccggagtatggtgttgcgaagggaatcttctattccgtgtttcactcaatctctgcattttgtaatgcgggtgtagatattcttggagattcaagctttacgagatatgtcaatacaccagtgatcacaattacgacaacaatgcttgtcattctcagcggtcttggttatccggtatggatcgatcttgcgaagaatataaagatgacaatacagtccaagggaaagcggccagtcggaaggacgatcacaagactgagcctgcagagtaaaattgttctgacaatgacgttgttccttcttactttgggaacagtaggattctatctgttggagcatcataatccggcaacgatgggaacattgaacgctgcagggaaattccaggcggcttttttccagtctgtgacgacgagaacggcaggatttgccagcatatcccagtcaggccttacgaatggttcgaagctgctggccagcatgctgatgatcatcggtggttcaccggcaggaactgcaggtggtatcaagacaacaacagttgctgttctcttgcttacagcaatttctgtcttgagaggaaacaaagatacggaatgttatggaagaaaaattacattcgaaattataagagtagggataacaatcacacttgtgacatttgtcttctggctgtttggggtgacggtgatgacagtgatcgagccacagcagaaagtccttgatctgatgtttgaggcgacatccgcgatggcaacggttggtctgacagcggatctgacgccagtgcttagtgatatcagtcatgtcgttctgatgctcatgatgtatattggacgaatcggaccaatgacgatggcacttatattttccggtcatgcggacaagaagaaccagttccgtactctgccggaagcaaagatcatggttggataagaaaagataaaagagaagataagagatacgcgataaagataagaaacagtatatgagaaggagaaaacgatgagaaagcagtttgcagttcttgggcttggaagttttggacggagtgtggccctgacacttgagagtatgggatgcgatgtgatcgttgtagataaatcacaggagacgatccaggagatcgcggacagagtgacctatgcgatcacagcggatattacagagaaagaggcattgagcgcacttggaacaaggaatctggacggagcaattattggagttgcggaaaatcttgaagcagggatcatggcgactctgctttgcaaagaaataggaattccaatggttgttgccaaagccaagaataagttacaaggaactatattgaagaaggttggggcggatactgttgtatatccggagattgagatgggtagcagggttgccaaaagccttttggcgacagaattcacagactggatcgaactgtcaaatgattacagtatggttgagatcgctgttccaaaaccgtggatcaatcacagtatggcagaactgggaatccgtacgaaatatggagttacagttgtaggaatcatgcagaacggaaatgttaatgtagagattgatccacagatgccgcttccggagaatgcgctactgattctggttggggcgaacaaagtactcgaaaaaattggaaaattggagaaatagattatgataataagtacatcgaatgcacagatcaaagaactggcgaagctgcagaagaagagccgcttaagagacgagaaaggaatcttcctggtagaaggaccaagaatgacagaagagattccggcagaacgaattgagaaggtgtatgcttcagaaagctttgcaaagaagaataaagaatttttggagagattacaggcaccggtcgagcttctgacagatactgtgttcgcttatgtgtcagatacaaagacaccgcagggaattctggcgattgtgaagagactcaattatacgatgaatgacctgatgcaggtgaaaaatcagaaggcaccgcacctggttgtgttggataatctgcaagatccgggaaatcttggaactattttcagaacagctgaggcagcaggtgtaaccggaatcttattgagtaaagattgcgtggacgtctacaatccaaaggtgatccgttccacgatgggggctgtattccgtatgccgttcctctatgtggaagatcttccggagaagatcaaagagctgcagaaggagaacattaaaacttacgcagcacatttgcgtggagaaaatgcatacgacgaggaagattatacaactggttgtgcatttctgatcggaaatgagggaaacggacttcgtgatgaagttgcagactgcgcggattgtctcatccgtatcccaatggaaggcgaggcagaatccttaaatgcggcagtggcagcggcggttctgatgttcgaagcaggaaaacagagaagaaagaaataataaaaatgcataaaagaatgtataagtactgaataaatatgtataaaatggagtaaaataaagttttagttgcatttttatacatgaatgtagtatactaaattcatcggttacaatgtaggttcaaagatatgaagaagagaaggacagagagggttctgattcatatagttatagaatagaaaggacgagaacaatggatttaaaaggaagaaattttctgacactgaaggattttacaccagaggagattacatacctgcttgacctggcagcagacctcaaagagaagaagaaaaacggagtaccggtggatcattatcatggcaagaacattgcactgatctttgagaagacaagtacaagaacacgttgtgcattcgaagtggcagcgcatgatatgggaatgggaacaacttatcttgatccatcaggttctcagattggaaagaaagagagcatcgaagatacagcccgtgtacttggaagaatgtatgacggaatcgaatatcgtggattcggtcaggaaatcgtagaagatcttgcaaaatatgcaggagtaccggtatggaacggtctgacaaatgaatatcatccgacacagatgctggcagatatgctgacaatccgtgagaatttcggagaactcaaaggccgcaagcttgtatacatgggagatgcaagatttaacatgggtaattccttgatgatcgcatgctctaagcttggaatgcatttcgtagcatgtacaacgaaagagtatttcccgaatgaagagcttgttgaaacttgtaaaggttatgctgcacagtccggagcaacaattactctgacagaagatgtaaaagaaggaacaaaggacgcagatgttatctatacagatgtatgggtatccatgggcgagccggatgaagtatgggagaagagaatcaaagaactttcaccatataaggtaacaaaagaagttatggcaaatgcaaaagatacagctattttcctgcattgcctgccggcattccatgacctgaagacaaagatcggagcagagatgggacagcgtttcggaatcgaagatatggaagtgacagacgaagtattcgagtctgcacagtccaaagtattcgatgaggcagagaacagaatgcatacgatcaaggctgtaatggttgcaacacttggcgagttctaagagaacgtaatcgcacatcgtgtgaacagtaacgcgcaatgtatttgatgaacttgagaaatcagcagaagtttggtatgataaatgagttaaagatcagaccggcttctgtggaaaataagaaagagcagaaggtgtctgttattccagagatgggacagacacctttcttattagggcaatactttcctatataggtctgatgagaggtggaattaaaatgaaagctgaaatattaaaattattgagggaagcggacggatatgtgtcaggccagcagctttgtgaaaagttcggggtgtcaagaactgcagtctggaaggtgatccgtcagctgcaggaagaaggatatcaggttgaagctgtgcggaataaaggttatcatattgtagatagtccggatgtgatgacgaaagaagagctcgatagcctgatggatacgcagtgggccggaagaaacatcgtttattacgattcggtagattctacaaatctgaggatcaagcagatgggagatgaaggtgcaccggaaggtacacttgcggtagcagataagcagacagccggaagagggagaaggggccgttcctgggattcaccgtcaggttcaagcatttacatgtccttgttgcttcgtccgaagattgaaccggatcaggcgccgatgctgacgcttgtgatggcattaagtgtagcagagggaatcatggattgcggagattcctgtggaaacccagatgtaaagatcaagtggccaaatgatattatcattaatggaaagaagctcgtcggaatcctgacagagatgagcactcagatcgattacattaatcatgtaacgattggtgtagggatcaatgtgaacctgacagagttccctgaggagatccgtgagacagcgacatcactcagactggaatgtggacatgtggtaaagagagcaccgttgatcgcagcagtgatgaaacgctttgaacagaattacacggttttccttgaacatggagatctgtccggtctgaaagaacgttacagcgaattactggttaataaagaccgtgaggtccggattcttggcgcgaaagaacagtacaatgcttacgcacttggaatcaatcagacgggagaattgatcgttcggaaagaagatggaaccgaagaggcggtgtatgccggagaagtttcggtgcgcggcgtatatggatatgtataaccaggtggataagacctacggaatgtgaataagtcatcgggattatgcagtgaatgtggaaaatatggaaaggtaagtactgtttacagaaactgtgggcagtgatataaggtgtaaaaattatggatgaagaaatggtattgtgtgcggccagctcctatgagcagaaatattatctgaacccggaatttgaatctcttccggaagcagtgaaacaggaactgcagatcatgtgtgtgttgtatacagcggatgttggaggagttctcctgctggtgtttgatgagaatggaaaccttgagttgaaagtagagcacaacgagggtgatttctcattcgatgagattggtagtgttctgaagatcaaagagttgcaggacacaaaggaagagcttttcaagtctcttgaaatgttttacaaagtattctatctcggagaagagatggaagaagagacagaggaataaatagtcaggtaaatagattacggtttatctgtcgaattttaaaactataaaaagcccatggcggaatctgaatgataagtttgttgaacttatcagaattcctgctatgggcttttgtttctcatagtttccgtttaacgataggtcactttttatctgagcaataacttcagaacgtcgctgacctttttcaccggagtgattttcagcttatcctttacttcagcagctacatcttcgagatcatctgcgttgtcaaaaggaatcagtacttttgtaataccggccctctgggcagccatcagtttctcaggaagcccaccgatcggaagtacacctccgcggagggaaacttcaccggtcatggcataatccgggctgacagcctttccggtaacaagggaagcaagtgctgtggttaatgtaatgccggcagatggaccgtcttttggaacagctccttccggcacatgaatgtgcagatcatgatcctggaaaaccttgctttctttaggataaagagacttcacaagtgtcagtgcaatctgtacagattctttcatgacatctccaagctgtccggtgatgatcacctttccttctccttctgtcagctttgtctctataaacagaatctcaccgcctgcctgtgtccatgcaagtccggtgacaacaccaggctgtgtggaagttaatttctggtcatgatgcagtttcttacggccgagatagtctttcagattcgatttatttactgtcagagtctgcccctcttcttttacaaggcgcacagcagcggaacgacaaagcatatcaatctgtttcttaagtccacggactccggattccatcgtataatcttcaatgaccttgcgcaatgcaccatccgttatctttaacattttcttctggattcccatagcgttcattgcctttggaagtaagtgctttctggcaatatggaatttttctaccgccgtatatcctggaaaatcgatcacttccatacggttcagaagcggttcgggaatcgtatctgtagaattcgctgtgcagacgaacagaacattggataagtcatatggaacattcatataatggtctgtaaatgtactgttctgctccgggtcaagcacctcaagcaatgcacttgccggatctccgccataatctttcgcaagcttatctacttcatcaagaactacaacaggattggaaacgccgctgcgtttaatcccttccatgatccgtcccggcatagcgccgatataagttcttctgtgaccgcggatctcagcttcatctcgaataccgccgagactgatgcggacatattcgcggtttaacgcacgggcaatactctgtccgatacttgtcttaccggtaccaggcgcaccgacaaaaaggaggatggaaccatactgtttccggttcagtgccataacagcaatctgctggatgatacgttctttgactttcttaagtccataatgatcttcatcaagaatctcttctgcccggtttaaatcaatcggtgtaaattccggatgcttccaggaaagactggtgacaaaatcaagatagtcatagagaagcccatattcatggctgtcttttccttcctgcttcatacgattcaggactttgtccgcttccttacgggcatcttcattcatgccggattcctggatctttttttcaaaagcgcggacatcggaaatgttttccgggtgcatctcatctaattctttctgaaggtaatcgatctgcttcttaattgcaacctctctgtaaagctgctcctggtcacctttctgtgcctcctgtgcttcagaagaaactttggcaacttccatgaattctttgatcgcattctcaatcagttcacagcgctcacggcgggaatctgtctcaacaattgcatatttttcttcggaagtaatgttcagataatctgaaagagcagaaccaaggtcatagatattctttctctggataatgtagcttcttgcccagatcccccattgataattctgaacaaatttcagaagcgagttccgcaggtttgtgaaagtctgcttctcttcttctaaaggaagatcatctacctccgggcggatggaagctgtagctgtaatctgtccgttctcatccagctcaatatcatcaagactgacacgttctaatgtacgaatctggatgctgtcatcatcaccgatggattcgactctcgcagacataccgaccgggtaaatatcatctatagtaacagtagtctcatccacctcatttttcaaaaatggaaacagaatatctgtaccgacttcaatctggtctgcagcagcccccggaaagaaatcacgtttaaaaaaataagtgatatcagggagtaataatatattaaaaacaggacgaataatcataaaaacactcctttcgtctcatgatttatcatatcaccgtcagcgattcaaaatggtgagatatgttgtataatgcaggtgccgcgaacagaaaactgcttacagctgtgccatcagaaagtttagcgatcccgcaggattctcagttcctttttccaaaagagagacaagagcagagattgtctgttcaatctcatctgctgttgaaggtactaaggtgttatccatcttaacagtcagtacaatcagtacgatctcagcaagagaaacagggtcagcacagaggattaaatcctgtgcaatcccttgttcaataatggaagcaagaaccggcttgagtgaaacgatgagatgattcatgtacttttgatgaagaaaagcccgctccggtgcagcctttgtagttgatggctgtgtctttaaaaaagccgcagaggaatttcggcaggcctgaaagatcagagccatgcgtgtgaaaggtgaaatctctctttgctctgcaagatgtcttgctgttgttattggagcttcataattgcgttctaccagtgcttcaagaattgcatctttggaagaaaaataataataaatacttccttttccaatttcagcagtctgagcaatctcactgacagagatattagaaagttctttggtttccagaagcttttgaagagcatccagaatcttatcgtattttaattgttttggcatagaagtccgcctcgtatattcgtaagtatatttgaccggttccagattacgggaactgaccgatatccttttaagtatagcacaataaagtcggaagaaccaataaaatagaaataaaaaagaggacaaaaaaaggacactttaaaacaaaagattgtctgaaatagataattgaccacgggtcgaaaaagtgatagattaaaaacatagcaaatcgaccaccggtcgaaagaagaaaagctgaaaaggagagggagagaagaatgacatacgcagacatgttttcaaaagtaaaaggaatgatgatggaagcagacgtaagtactgtgaatgaacatcttgcatatcagtttaatgtaacaggagaagcagagggaatcttttatgcagaggtaaaagaaggaaagctgtatgtggaaccatacgagtattatgacagagatgcgatttttacttgttcggcagagacattatttaagatcaatgagggaaagctggatccggttctggcagtaacactgggaaaattgaaagtagaaggcaacattgacaaagctctgtatctgaaaaaactgattgatagcagaaaagcagaacagaatacaataaagaaaacacagaaacagaaataactgtaaaaaggaagcaaaggtgaaaaagatgatgcgttacggaaaacttcttgcacttgcaggcctggtgggaatcgtatcagcagaggcaggtggaagtgcatacttttacagaagaacaatgatgcgttataacgcaaagacagaacgcacgatgaagatgtccggggtagactgggatcagtatttctcaaagatgaaggaatgcagggaatggatgatggagcagcctcatgaagatgtctggatccggtcggaagacagtttgaagcttcatggaacgtatttccggggagcaggaaatgtcgaagaaaagaaatgcaaaaaagcagtgatttgttttcatggctacacgagccaggggcttgcagattatggaagtatttcaaattattatttgaagcgtggttataacgttcttcttgttgatcagagatcacatgggcaaagtgaagggaaatacattggattcggatgtaaggaccgttatgatgcatatcgatggattgaatgggtgattggacaggaaggagaaaatgttcagattctcctgcatggtaattctatgggaggcgccacagtattgatggcaagcgggcttgatctgccgcagcaggtaaaaggaattattgcagattgtccgtttacttcgcccaaggcagtgtttacacatgtacttcacagcatgtatcatcttccggcgtttccaatgatacagattgcggatgcggtgaataaaaaacaggcaggatatggactggatgagtgcaattctgcccgtgaagtcagaaaagcaaaagttcctgtccttttgattcatggagacgcagatacatttgttccatgcagtatgtctgaagaaatttataaaaattgtaaatctccaaaacagaagctgatcatccacggggcaggacactgcgaaagttattataaagacagagaagcttatgaaggagcaatggattcatttataggaggaatcatagaatgatgaaaacaagaaaaggatatcctgtatacccactgacagtagcgcaaaaatttcatttgtattatctgccattttgtccgaatgcggcagtattgaatattggcacaagcctgacaattggcacagatctggattgggatgtactccgagagtccatttacaaagcatatgagagaaatgaagggatgcggatacgctttgcaaaggacaaagaggggaatgtatatcagtatgttgtaagtgcagagcaggacagaaaagaacgggagatagagttcgttgatttctccaatgtgactatggaagaggcagctgatacgatgcagaaatggacaactgtcccatttccattcgaggattcactgatgacgaaaattaaaatgatccgcactccagatggattcaacggagtgtattttctcggacatcatatggtggtagatgctcagtcgctgatcacatttctgaaggatattattgagctgtactgtaatgcaaaatatgaaggtgtcccatatccaaaggatatgtgttcttacatagatcaggtaaagaaggatctcgcatatgaagccggaagtaaagcacagcagcgagacagagaatttttcagggaactgattgaagcatcagagccggtttataacggtgttaatggaacagataagctggatgcagcgagggaaatgtttaaaaatccaaagcttcgttctgcatttaatgcgacagatgatgtgagttctgcattggatatctttcatttggaagcagaaccgaccaaacgtctgatggatttctgtgaaaagtaccgggtatccctggcatgtcttttattgatgggattacgtacttacttccagaaaatgaatggacaggaggatgtatcgatcaataatgcgattgccagaagggctacattaaaagaaaagaaatccggtggaacaagaattcattcgttcccgtttcgtaccgtattttcagaagatgtgaagtttatcgatgcagtatatgaaatccgtgataagcagaatgaattattccgtcatgcaaattatgacccgacagaatatttcgcatatcgctccaggacatatccacagccacagaaaggactgacgtatgagccgatgtctttgacttaccagcctatgacattgcaggagaaaggactggaagatcttggaggaattcaatataagacaaaatggtatccgaatggaatgacaacacaggcaatgtatctgacagtcatgcaccgaccggaggataatggattggatttcaactttgaacatcagaaaaaagcaatctcaagagaagagttggaatatctgtattactatttatgtaaaattatgttcaagggagcagaaaatcctgaacttacaattggagaaattataaagcttgtataaaagaaagatgatccggatcatgttgagaatcacgatcaggacagaatggaaaggaaaaaatcatgtttgagcagttagtagatattatttgtaattatgtagaaattgaacaggaagacatcaagccggaatcacgttttatggaagatcttggattcacatcctttgattttatgagtatgcttggtgaaatagaagacgagatggatgtggagattgaacaggacaaggcagcagatatccgaacagtcggagaagctgtagcgtatcttgagtctttgaagtagagggaaaagaaaatggaatatagaacaattcgcgatattcttacaaatgcagaaaaatgttttggaaatgaagacgcaatccgttacaaaataggaaaaaatgaaattgcggcaaagacatacacacagttgaaagaagacagtgagagaataacagcattattgaaaaaactgggagatccaaaaagtcatatcgcattgatcggtgcgacttcttatctatggattgcttcctattttggaattgtggacggcggaaatgttgcagtaccgttggatgtgtcacttccggcagaagaactgtgtgaacttatcgaccgtgcagatgtaacaatcctgattgtggatgagatccgtaaagatgtgatcgaagcagcgaaagaaaagtgtacaaaactgaagtacatcctttctatgcagaaggaagcgaatgagggcaatatactttctcttacaaaatcaatgatggaacaaacgatagatgaggacacaggagtagaaaaaacagagattactccggatcaactctgtacgatcatgttcacatcagggacaacaggaaagagcaaaggtgtgatgctgacacacagaaatctcgttgagaacgcgacatgtctggatatgaagctcccagagagaaatgtgatcctgtcagttttaccgattcaccacgcatactgcctgagtatggatatcctgaaaggaatttctctcggtgcaattatctgtatcaatgactctttgatgcgtgtagcaaaaaatatcaaattatttaagccaaatatgatcctgatggtaccgcttatgattgaaacttttgcaaaaaagttagaagatgtaaaagaccttccggaaaaagtggtaaaagaagcagtatttggatctcagttccatacgatctgcagtggaggggcatacctgaatccggagtatattgagctgttcgaacgttttggaatccagattctccagggatatggaatgacagaatgttcaccggtcatcagtacaaccgttgcatggaatgtaaaaaagaattcagtaggacaacttcttccaaactgcgaggcaaagaccgtagatggagaactgtgggttcgcggaagcagtgtaatgcaaggatattacaagatgccagaagaaacaaaaaccgcactgaaagatggatggctttgcacaggggatcttggatatgtagatgaagaaaggtttatctatctgacaggacgaaagaaaaacttgatcattacaaagaatggagaaaatgtctcaccggaagaactggagaataaattaagttcttcaagactggtacaggaagtattagtaagagaagcaaaaggagtgatcgaggcagaaatatatccggatgaagagtacgcaaaaaagcagggacttgaaagaaaagaggaagtccgcttagaacttcaaaaactgattgatgaatacaatcagggtgcaccggcatataaaaagatttatagtctgatcattcgcgagaaagaattcgagaagacagcttcaagaaaaatcaagagatattaaaagacagataaaaaagtctgaataaacggaggattgcaaaagctttgtgattgccggatttattcagactttttgtgtgaatgcgaaagaacagatcgtgtacgttgacttttcggcagttatttactatgatactaaagtcaaataagaagaatagttatagattagaaagaatagaatatgatgaaacagttgaaaataggaaatgtgacgctgccaaaccgttacatcttaggaccgatggccggagtgacagatcttccattccgtgtgttgtgcaaagaacagggagcaggtcttttatgtatggagatggtcagcgcaaaagcgattttatataataataagaatacagaatcacttctggagatccacccggatgaacagccggtgtcactgcagttttttggatcagatccgaagattatgagtgagatggcaaaacgtgtggaagagcgtccatttgatattatggatatcaatatgggatgtccggtgccgaaggttgtacgtaacggagaaggctctgcacttatgaagaatccgaagctggtttatgaaatcgtcagtgcaatggtgaaggcaattgataagccggtcactgtgaagataagaaaaggatttgatgacagctgcattaatgcggttgagatcgcgaagatcatcgaggaggccggggcagcagctgtagccgtgcacggaaggacaagagaacagtattacagcggacaggcagattgggatatcatccgtcaggtaaaagaagctgtctctattccggtaattggaaacggagatgtgacaagcccacagaaagcagaggagctggtaaaacagacagggtgtgacggaatcatgatcgcaagaggagcacagggaaatccatggatcttctccgagatgatcacatatgaagagacaggcacattaccagaacgtccgggaaaagaagaagttcgagatatgatgcttcgtcatgccagattacagttgaaatacaaaggtgaattcattggtatccgcgagatgagaaaacatgtggcatggtatacaaagggattgaaaggttctgcaaaattgcgtgaagaaatcaatcgcgtagagtcctatcaggaactggaagaattgctctttcagagactataggaaaagaagctccgggacttcggaaaacagttggaaaacagaatggaaaaagttcggaaaaaggcggttttaaaggcttttcatacactgcgcagaagtgacctgtgagagtgaaattgcttgacagaaagcgcgagtttgagtataatattgaaattgcggacggacgctgatacaacgattggcgttcaggagaaaaagacagcagacatgcattttaaaaccgataatatgatgtaagtgtcaaaagtataaattgcatagcaatggagcaatccggttacatcataatatctgtagacagagaagaaactttgaatgcatgaaaagtatagacagaaaatgatttgcagagaatctgtaaatgttgtaggaaacgaaacgttattgcaacaggcagtgacggtaaggaagtagaaaggaagcaggaacaatggcagaggcaaaaaaaagattacttacttatgccggattaaaggcaattgaggatgaacttgagaatctgaaagtagtaaagagaaaagaagttgcaggtaagatcaaagaggcaagagagcagggagacctttccgagaacgctgagtatgatgcagcgaaagacgagcagagagatatcgaagcccgtatcgaggagcttgaggcaatcctgaagaatgcagaagttgtagtagaggatgaagttgatcttaataagatcaatgttggatgtgcagtaaaggtttacgacatcacatttgatgaagagatggagttcaagattgttggttctacagaggcgaacagtctggaaggaaagatctccaatgagtctccggtaggtcacgcactgatcggaaagaaaatcaatgatgtcgttgacgttgagacacaggcaggagttatccagtacaaagtacttgatatcaaacgttcataatcagcttaggacagacctcttactattaagaggtctgaattcgcttaaaaagacaatataaaaagtgactatttctgtagtgatttatgtaaaaatcaatgcggaagcagatagaaacggaaggagaacagacagtgggacagaatcagaagaacacacaggaaccagatatgaatcagctgagaaaggttcgccgtgagaaacttgcagaactgcagcagaacggaagagaccctttccagattacaaagtttaaccagacacaccattcactcgaagtaaaagatctctatgaggcacatgaggctgagattttaaaagatcaccagcagccgaacgtagaaggtatggatgaagagcaggcaaaagaggctctcaagaatgattacgaagagagaagaagcatcatggatgcaagcccgattcacgtagcaatcgcaggacgtatgatgttcaagagagttatgggaaaagcttctttctgtaacatccaggatttacagggaaatatccaggtatacgtagcaagagatgcaatcggaacagacgcttacgctgatttcaagaaatctgatatcggtgatatcttcggacttgaaggattcgctttcagaacaagaacaggagaaatctctatccatgctgagaagatgacacttctttccaagagcttacagatgcttccggagaagtttcacggcctgacagatacagacacacgttatcgtcagagatacgtagacctgatcatgaatgcagactctaaagatacatttatcaaacgttccaagatccttgctgcaatccgtaagtacttaagcggagaaggatttatggaagttgagactccgatgcttgtagcaaatgccggtggagcagctgcaagaccgttcgagacacatttcaacgcactgaacgaggacctgaagcttcgtatttcccttgagctgtatctgaagagactgatcgttggtggacttgagaaagtatacgagatcggacgtgtattccgtaacgaaggtcttgatacaagacataacccagagttcactctgatggagctttaccaggcatacacagattaccacggcatgatggatctgacagagaatatgtatcgttttgttgctcaggaagtccttggaacaacacagatcgtttacaaaggaatcccgatggaccttggtaaaccattcgagcgtatcacaatggttgatgcagttaagaaatatgcaggcgttgactggaatgaagttgagactctggagcaggcaagagaacttgcaaaagagcataatgtagaatttgaagagagacataagaaaggtgacatcctcaacctcttcttcgaggagttcgtagaggagcatctgcttcagccgacattcgttatggatcacccggttgagatctctccactgacaaagaagaaaccagagaatccagaatatgtagagcgcttcgagttcttcatgaatggatgggaaatggcaaatgcttactcagagctgaatgacccgatcgatcagagagagcgtttcaaagcgcaggaagaactgcttgcacagggagatgatgaagctaacacaacagatgaagacttcatgaacgcactggagatcggtatgccgcctacaggtggtatcggattcggtatcgacagaatgtgtatgctgctgacaggagcagaggcaatcagagatgtattactgttcccgacgatgaaaacagtgggcgcaagcgagaataaaaaaggtcaagaatctgcaacagcaggagatgacaataatggattttttacagcaaacgaaaagattgatttctctaatgcaaagattgaaccaatctttgaggaaatggtagatttcgaaacatttgcaaaatctgatttccgtgcagtgaagatcctggcttgcgaagcagtaccgaagtctaagaagcttctgaagtttacactggacgacggagtacgcaaggatcgtgtgatcttaagtggtattcatgagtattatgagccggaagaactggttggtaaaacagcaatcgctattgtgaacctgccaccgagaaagatgatgggaatcgcttccgaaggtatgctgatttcagcggtaaacaaccttaagaattcagaggatgaagaacttcatcttctgatggttgataaccacatcccggctggtgcaaagttatattagaataaaaaagatcaagatgctttagggcgaaaaagtgtttactacaacgctaactacaacaaatttgaaatttgagatgaagaaatatgggctcaagtgacggattgcgctaaagagtattggaaaaaaggatataaaataggaatctttccttcagaaataactgaggagaggttccttttttgtttgtagtttccaaataaaaaagatgaacttgtgatatggtgaaaaatttatgtgaatttggagcgctctatgataaagcatagagcgcaggataaaaatgaaaggggattaagtgtaatggagaaattgaaactggatttttattacgggagagaagcagagcagtttacattttacagacttccgaaagctctgatcacagatgcgtgttttaaaggaatgacaaataatgcaaagcttctttatgggttaatgcttgatagaatgtctctttctaaaaaaagaggatggcttgatgaagcgaataaggtttttattaagtactcccttaacaatattgaagaagatttaaatgttagtcgaaagacagcaagctctcttttgaaagagctggaagaaattggtcttattgatatgattcagcagccaggagtagcaaatattatttatgttaaaaattttgtgtcagagcgagaacaagaagatcataacctgagagaatctgaagataagtgcaatgaagaaactagtgtaaaatctaaaccagtggaaaaagtacaccagtgtaaaaattctactggtgaaaaaactacaccagtagaaaaaagtaaccagtgtagttttgaaccggggagtagtgaaaaaaatacactggtaccagtggaaaaattacacccgagtaatatagaaatagataataatataaataataataattctatcaatcaatcatatcagtcaatagataagattgatgtgatggatgcaacagcagtatatatggagttaatcagagaaaatattgattatgatattatgatgctagattatgaatggaagcatcgtgacatgtatgaagaattgtatcagatcatctgcgatgtagtctgtgtacctagacaagaggtccgtattgctggagaagattatccgtatagcttagtgaaaagtaagttcctcaaattgaaaaaatcacatttggaatatgtgatcggatgcatggaaagaaacaaaacaaagattgtgaatattaaggcatatttgatcacggcgctatacaacgcaccgaatacaattagccactattattccgctgaagttaatcatgatatgtgtggcgtacgactaggaaattgtacaggaaatcaatgagcgaattgttgagattttgatatccgactattacaattaaatatgatatattttgagatctgatacttaattcaaaaacagatagcggaataataagatgctgtaatagaatgaagaaaagtggatatgcaagaaagcgaataatttaaaaatgaaatccaaaggagtgatgactatggagaataaattggaaaaaatcgatcaaaatagttttatggataattttgttaaaaccgacgacatcttaaaagatatgtgtggaattattgagtcctcacaaaaagctgcatatcgggcagtcaacacaacgctcatacagagaaattggctccttggttataggattgcaaggtgaggataggacaaaatatggagcagaaattataaaaagttggcaaaagaattatcggctgaatatggaagaggttatacaaagtcgaatctatatagcttttattctttctataagacctaccctgaaattttccagacatcgtctggaaaatctgttagattactgtcttggtcgcattatgcagcattattacaggttaaagatgagaaagctcgagactggtatgagaaagaagcagtagaacagacttggagtgtccgtactttgcagaggaatatttcttctcagtattattaccgtatgcttaaaactcagaaaaaagagcttgtagaaagtgaaatgaagaatctgacggcagcattgtacaatactccggttatgatgcaaggatattatcatgctgaagttaatcatacgatgccagagtatgcagaactggaacagtgtaggaacgagctcggttttagttgcaatttgtatcaaatttaattgtgatagaaaatgaaatgagaaaaggagaaatctagatgtctcgaatgtggttttgttttggttaaagatgatggaaaagtagatagaaaactgggacagcagaagcaacagcaagcggtagctggaaaagataagctggagagaggctgatcggggtgtaagataaagagaaataaaaggcctggtagatgattttaaaagatcatttaccaggcttattttcaatgtttgtttttgctagagattctaaattgatttggagtcatatgatagtgctctttgaaacatttataaaaatgagttgtattagtaaaatgtaattcttccataatttctgaaatagaggaagttgtttcttttagtaatgtagcagcttttttcatacagaaagtttgcccataatcaaacagacatttgtgggtatattttttaacaatggtgttcagataattgccactatagtttaatatttgttccaattcggagcgagagattcttccatctgtatcttctaataaatggcaaatatgagaaaataatataaaatcattgtcagcttctacgtgaaccggtgtaaagtgaaaatgtgtaggatctgccagatagtcaaataattctaaaagcatcccctttataatataagtggaaccgagttttggaaacataattgcacgtaaaatattgtcagtaattgcgtgaagagtgtgatgccagtctttattattaagtgcgggaagaaaatctaaatattctttcgtatcaggattatctaggttgtctgtaagaaactttaatataggatttattcctggcatttcgatatctggaaaatatactttttgttcatcatcagacagttgttttacaagttcttttgacatacctataaataagagtgttgcatctgaagaaaagacttctttatggacgatattatggttcatcaagcaacagtttccactatgaaatactaggtcagattgttctatctgctggtggatttctccgtctaaaacaattaataattcatagaaatcgtggatatgtggggctcggttattaaattggtggatttcttttttggtttgaaaatgataaaaagtattttcacgtggtgatgtcatcaagaaattgagataagcattatcatctgactgacagcatgtttcgagagtgaactgaataggtgtcagtatcttgatataggagttaataccactatttaaattatcctgttcgataatattattaactgtataggatgaagccatttcaacaagtcctccctttcattcacgaatatgataaaaatttaaatatattctatcatatatgttgtagtattataagacataatttattaaagtaatattataaaaacataagcgtttatgaaatgaaaaataattgtgccgaggaataaggaggttacaaagtaatgcgtgaaacagaaaagaaatacttgaaatggtatcaaaagatagcctatggagcaggcgatttagcttcaaacacaagttatggattagtatccagttttgtgcttttgtatctgtcagatacaatgggattaaacacaggaatcatcggaacattgatgttagtatctaaatttttagatggaatttcagatgttatatttggtaacttgattgaccgtacgaaatcaaaactaggaaaagcaagaccgtggatgttatacgctcaaatcggtgtatcattatgcttggtattgctgttttctattccgggtgggcttgggacaacagcacaatatgcctatttctttgctttttatacagcattgaatgctatattctatacagcaaatggaattgcatactcagcattatcagcactcattactagaaataagaatgagcgtgttcagcttggttccattcgttttatgtttgctgttgcaacaaatattgtaatgggatttgcagtaactaatggagtagaagcatttggcggtggagctgccggatggagaatggttgcgattatttgtggaacaattggtcttgtagtaaataccattagttgtctttgtgtaaaagaattaccagaggatgaaaacattgtagttgaagtagagtcaaagacacaggatgataagattagttttggggaatctttaaaacttctttttagcaataaatattatattttaatagtagcaatctatattgtatattattttatgagtaacttaacaacaggttcagctgtttactttatgaaacaggtacttggtgatggttcattactgggcttattctcaatgatgaagatgttcccagttattattgcattgatttttacacctatattagtaaagaagactggaagtatgcaaaaagttaacttctggggatatgtcattagtgatattttaggtattttcttaatcttctttgcaatgcagaagaatctgtcaatgatgcttctgtttatgttcttaaaaggaacttttgcaggaacaatgtcaggtacattaaatgcattgattgcagaaatcagtggatatacatatcgtacaaaaggtgtacatattgatggtatgatgtttagctgctcatcacttggagtaaaagttggtggtggtataggaacagcagcagttggctggctgttaaatgcatccggctatgttggaacagcagcaactcagacaagtggagcaattaatatgatctttagtatgtatatcacaattcctgtaatccttggagttgtaatcactgttcttttaggacttatgacagtagaaaaagaaaataagagaatagatatggaaagggaagcgaataattaaaatggaaagaggaacaaagtatgcagtgtcagaaatttaatgatcgctggacatttgaaaaagtagatcaggatgacagattaaaggctttttatggtgatgacaataaaataattgttacacttccatatgatgctatgattcgtgaaaaaagagataaagagtgtccggcaggtgcacagagcggcttttatcctgggggagtttatacttatgaaaaatcatttttagcaccagaagaatggaaaaaccaggatgtggtgttagagtttgaaggaatttacggaacagcaagagtttggataaatggggcccttgcaactgtaaatagaaatggatatatgggcttttctgtagacttaaagccatggatttgttatggacaggaaaatttgataaaaattgatgtagataacagtaaccagccaaatagcagatggtatacgggttctggaatttatcgtgatgtgaatttatggacagggaaaggtgtctatattccacatgatgagatgaaaataactacgttatctgtaaatgatgatgtagcagttgtggaagtttgtgccaacgtaaagaatacaaaagaatgtggcatagaagcaaaatgctatgttgaactgatatttgagggaaaaacagttgtaacagaaaaacagaatattgtattttattctgaaagaaaagaaactgtaagagtacagattcctgtaaaatgtccgaaaaaatggagtacagatcatccgaatttatatcagtgctgtgtcaaaacatatataggggacgaaatatgtgatgaatatacagtggatttcggcattaggacgcttacacttgatccagttaatggatttcggatcaatggggaaacagtgaatttaagaggaacctgcattcatcatgataatggtgtgataggagcagagacattcccagaagcggagtggtaccggtgtaaaagactaaaagaggcagggttcaatgcgataagaagttcgcatcatcctatgagcagagcaatgcttgatgcttgcgatcatttaggaatgcttgtgatggatgagttgaccgacatgtggaatcgaggtaaaaacacctatgatttttcagatattttcaaagaagaagcaccaaaatggattcaccacatggtagacaaggattataatcatccatcggtagttatttattctgtaggaaatgagatacaggaagcaggaacaaaacagggatcatggattaatcgttctttgtgcaatagatttcatgaactagatgccacaagatttactacaaatgctttaaatggattgaattgtgctggaaaacgactcaaggttattatgaaggaagtcattgaaaagtttggaatggacacacaaggcaatggaagtggtgggggaagtaatgctctcaatagctttatgagtcttatgtctggagaaaagggcgaggtttttgcaaagcatccacttgttacagaagccctggaagaatgtgcccagagttgtgatatcaccggacttaattatttgagtggaagatatgaacttgagcatgagctgcatccgggaaaaacggtacttgggacagaaacatatccagcggatattgaaaatctttgggagaaagttacaaaatatccacatgttattggcgattttacctggacaggttatgactatatcggcgaagcaggagtagggattttccattatgatggaaaagagaattttacaagcatttatccagaaagactgggttatattggagatatagacttaattggaaatcgcagaccaattagttatttccgggagattgtatatggattaacaaatcagccatacattgcggtagaacgtatggagcataggggacagacagcaagcaaaaccgcatggatgtttaaagataatatcagtagctggacttggaaagggcatgaaggagaaaaggccagtgttgatgtatattcatcaggagatgaagtagaattgtttttaaatggtaaatctcttggtaggaagccagctggaaaaaaatcccattacacagcaacatatgaagttgcatatgagtcagggactttaaaggcaatagcatatgagtcagggaaagagattggaaagtatgaacttgtcactgctgattcggtaaaaaggctaaaggcttgtcgtgttaccgagaatgaacgggatgtagcatacgtaaaagtgtggttagaagatgaacatggtgtttgtaacccacaagaaacacagaggagaataattcatgctaaggttacgggaaatggtgtgctagagggatttggtacagccaatccttcaagcgaagaagattatttctcagatacagtaacaacttttgaaggaagtgcattagctgtggttagatggaaggattcaaattcgaaagaatctgcagtccttcgactgtggacggacgatgacgtcgaggtatgcatagatattgggaggtaaacggtgatgaaaaagagtagcagaagatgcagtatagctattttaatgatgatttgtttatgcatagtgttgtcaataccatcaattcccgtacaagcggctgataatttgtcagaaaatgaaatgatttatggtgcagatataggttttttatcacagcttgaatcacaaggcgttgaatgggtggatgacaatggaaatacaagagatgctcttgagttgttaaaagaaaagggtgtaaatgctgtaagacttagagtttttgtaaaaccacctgagaatttctattggactaaacctgatggtacaaattgtatgcttggttacgcggatactcagggacttttatatacagcaaaaagagcaaaagagctaggtttgaagataatggttgtatttcactatagtgatcattttgcagatccattgattcaagatgttccatcagaatggaaaaatgcatcgactagtgagctggaaaagtatgtatatgattatacaagatatataatgactgagctagcagatgaggatatttatccagagtgggtacaggttggaagtgaagttagttatggtatgttgtatccgactggaagtaatcagtcaaatgattttactcaattaacgaaatatctgaatagcggatatgatgcggtgaaatcgataagtcctaattcaaaggtagttacacatcttacgcatggaagtgggataagccatttcgcatggttttttgaaaactttatcacgaaatgcggtggaaaaacagatgtgataggtatgtcatactatccgtattggacttcgagttatgatggagattgtatagaaaatgttgcgtataatttgaataaaatggcatcacagtatggtaaagatgtgatgatttgtgaaaccggtgagctcgaaagtaattcacaaggaacatatgaactgttaagaaaagaaattaacgctgttaaatcggttcctaacaataaaggaataggagtattctattgggaaccagaattaaattcgtctgttgtaccagatggttatacattgggagctacagaattagttgggaataataagttgcatttcacaaatgctttaaatgcatttaaattagctccggattacttgaatactgattgttcatatgaaatgatgaatatcaatagccaaaaatcggttaatattgcaactggatcacaagacaataatgcgcaggtagaacaatatacttatgaccagtgggacagccaaaagtggatatttgaaaaggtagacagtagctattataaaattgtaaataagaacagtggtaaagttttagatgtttgcggtctttctcaaaatgaaaatgcacaagtagttcagtacgaatataacggtggttggaatcagcaatggaagattactactacgtctgatgggaaatataagattcaaaacagatggagtggattatatttgggtgtgctgaataatagtactaatgatggagcatcgattgttcaggtatcggatgaatcgtcaagttctgaatggtttattcttttgacagattgatctgactggtaaatattgactctattttaacataaaatgctttattaaataatgtctatttaggggaaagtctagatattgttagagtcccacttgaaacagccaatgtaagaccaacagaaacaaccactctggatccgacagaaaaagccaattattgtccaatagaaatgaccataacaagtagtcttcagcagaacatcttcttgttctgcttgattactttatgcaacaggctgaaactgtgtcaatgtggcatatttgccggcgtatcccttgccattgattcagattgaaggctgctgttgtaagcaaatgctattgtagcttcaccagatataattaattatatgaatggttatttctagtgagctccaattggttgtttctatcagactctgaatggttaattcttccgggctctaacaatatcgtctatattgttgattttatctattattatttttctacaaaactttctttacgttcaaatactatataaaaatcgaggtaaactactaggtactgttcatttttttagaaacacacatgtaaaaaattcctctgatttctataattgagtttaataatcaaattaaatgatgtataatagacaaaaaataatgtggagagataacaatggatgcattattacaattaatgagctgttttttaaatgcaattatgtacatgattttaatctattacttcttacctttcaaattgcaatttaaagaaattacaattctttttacaattctttcaaccaacatgtttctaataaataaagttggaaattatggggttatttttctattgataagtgtaagtatttatctaatgtttatacgtaaaaatagattcataaatattatgtctttcgttatcagctatttatttatagtgatatttgaccaatttttttccttgctgtggaatgtttttgtttgtcctatttccactcttttgaaaaatactatatattatattttatatgtaatttcagctattgttgtacttcttataatatgcccttttatcggaaaatattatcatttattgataagaaaaatagaagcatatgtaaacaaacaattatttgttctgataggatctaatctaggaatttgtctaattatagttctatttaatgtgtttattggtgaatacattggatatacatctaggagtataggtttcaattgcatcctgtttgcctgttattttataattagtacgattctaatcataaatattacaaagcaaaatgaaaaaagaattgaactggaaaagcgccaagaagcataccagcatctgcaagaatatacaaatcagattgagcatatgtattccacacttcgttccttcaaacatgactactcaaatatgatgctgacaatggccgaatatattgcttctgaggatatcaatggattaaaaaattattttacaaacgaatttatgccaaagaaccaaaagttgacatcagatacaacaaaaataaattcgttgatcaacttaaaagatatagaattgaaaagtctgctctctgccaagttattatatgcattgaacctagggattaatgtagaaatagaaattatagaagaaatctctcacatccaaatggacattatagatttagcaagaatagttgggatttttttggataatgcaatcgaatccgctttggaaactgagcaaccaaaacttcactttgcagcaattaactctgaaaacaaaaaagtaattattattgcaaatacttttttagataaaggtattcctatcgcaacattaaaagaagagggggtatctacaaaaggaaaaaacagagggattggtctgtttcatgtaaaagaaattgtctctaattatcaaaatgtattatgggatatggaagtaaagcacaactattttatacaaacactaacaataacagaaactttttaagatcggagtaacaggctaatccttacttgattagccgacctcttacatcattatacatacacacggttccatatccggcggctctttagttttacaagcaccgccagataatagtcaatcatttattgatttacaactccttcttgcaatcactgtttggaaagctgataacagcttgaagaacaccacacacaactttcacccattagaaacatccgccgcaagacgcacaatagaaatagccattgtttcaaaaagaataatggctattctgaattttgtttggtataatagaaaaaatcccaaacagaactgccaacaaaagaagattaattgtgttctggtttaacataccagaaagtgttaataaagcataaaaaatcacaatacaaaggcttcggcaatataatattggataatgatattccgtaattggattattccttgtaccttgtggaccaataatccatagtagtaagatactgagtatatataggaaaataatccatttcaattgaagcgtcatatgttgcgcaagtaaaacccctcctattataaaactagtggttacagttaaacattgccaacttttgtggaagtgaatcccaccgacatgaatttttaaaattccataactaataaataaaataaatgactcctgaaataatcttaaataccctgctaaaattaatataacacatgtcatccaaatattgtggcataagacttgtagtcctaattttagtttcatacgctctaactgggtagtctcagcacacgctaatatatttaataatttttctgttataaattccataaaatcctcctctcataacttagtgtaaattgtaacaataacataaaaaatacgaatgttaaaaaacatcacaatcgttgcaacaaccattcaatcattacattcgcaactttcattcttttgtttttcttaataatcatgtacaattgttagtgatttcatgagctgtcaccagattgctcacatcagttgacgctcacttgcttaactttctgtcaccagtcagttaggcaataccgcctgtttccaggcggtacctgctttatgaagttaccatcccaagcatctcgtgttccacaacgaacttgatcatataatcatcgatcaatcgtttctgattttgaaacgcatacatcaaagctttttcacagacacggttgatcatccgtgggattcctgcagatgccttatggatctcatccaatgccttggttgtaaatatttcctgcccgcatccggagtaatccatgtggcttgcgatatattgttctgtttcagaacggtcaagatgaggcagcgtacagtacatgtcaatgcgctgccggatggcggcataccgctgtagctttagtttattttcccacagttctgtctgcccaactaaaacaagcgccatgggactcatggaatcaaaccggtaattgagcaaaaagcggaattcttccagcgtctccttctctaacaggtgggcttcatccaggatgcagacaacttttttacgctgtacgccccggattacctcgatctcctgttgcagctgacgctttgaatcaccgcggtagaaacgggattccagccccaactgatccagcaaacctttatagaaccaccttggggtcagttttgagtctgacagataaaggatgatgtaatcctcttttggaagttccgaataaaaccggcggataagcgttgactttccacaccctgaatcagctgttacaacagcaaacatctggcggtccgccacataagccagacgaccgagagtttcccggaaagcattggattcaaacagtttttcgggagggacgtcccggacaaagggggtatgttccatgccaaagaatgattcatacattagccattcacctccttcctgtaggaagcaaatgaaatcgcatctgccatttggcgcctgctctgggtatgcttcgtttccaaagcatccagaaaacgggaagttgtcggtttttgttcctgcatagcagctgggagcgtagcgtgtctatcgcaatacgccccaatctttacaggcattgcctgaaaaggttcaaatccgggatgagaaatggtgatgatctcaggatttgccggatcataggagatttctaccgtatacccgatcaaggccggcttggtttcatacctttgcccgcggaaactgatacaggcacctttatccactttcctctgctcatgatgcaggaaagcttcggctacaacggctgtatccaaaaaagtcagtgggcggctgtcccggttccattcctgaagcggtgagatcccttcttccggaacggcagcgccaaggctttcatagtattctgcgatgccatcatgctttttcttgtggtaatactcatccagatagatggcccataggcggttcagttcctccagtgttttgatgtttttcagctttgattcccggataaaagcatctactacctgatggaacttctcgatcttccctttgcttttaccggatcttggttttgcatacatcacacggatgcccaaccttgcaagggaagaccggatctgttttgcgatatactgtgtcccattatcaaagtaacaggcatcgaaggttccataccgggaaaccgcctgatggaacgtatcttcaatgattgcttcttcctgattatcatagaaccgggaagataaaaggtatctggagtggtcatcgattgccgaggacaggtaagtctgtaccttggctccatttcttccaatcggaagcttgggaccatacttgatatccgcctggatcagcatcatgcggtgtggtttgcagaaacgtttggaagaactgttccttgcatcctggtacatctgcatctgcttttggccgtaaccggccttgtagatatggcgttccaaagtagaacgctttaaagcaccgggtgctgcaagcccttccgtttccaggatgtagatgatctgggcaaccgaccgctcgggaacctccttgcgtagctggattgcctgctccaacagaaactcaaagttttcagggagtttttgtgagcggtgtttctcccggtcagccggctttagccctgtaaactgcctttccgaaaacgctttttcataacggtaaagggaacggaccgatatatgattctcctctgcaatctttttgcgcagctggatccgttttgcatcatccagatcagcctggagaagcggagaaatcaattggaaacgcctgagggcttcttcttcctgccattgttgtttgtttattcttgtattcataaaatagtgacctccttttgagaccactatacccgttggtaccgcgacagacgatgcaaagtaggtgcataagccttaccagcagatcgggactaaaaatcccccgctgttgtaaatctgacgcaagatgatttctaaccagttttgatattggtttctgaaagaatcgagcagtgaaccaagggaaatcctctcttcgttataacccagcaggaactccctgatcgtccttaaatatccgttgatacgttcaagattttcgcagaaccattgcagccagcggagcatggtagcgcaggacgggtagtcttcagaatctaagtcttccggctgtacaacgccatccagcaccccggagatcacttctgtttcgtaatgcttgtacggaacaagacaatccggaagttcattatgataagagtggcagttcttacaataaaaccgccgaatgatcaactgatcttttaaaccgccttcctttctacggatgcgtgggcgtgaatcccggtaacgaagcgtagcctgacagatggggcacatatgggtggtcacactgctctcaacaaaaaacaccaaaatcctccttgaggacaagtgaataatctgatataataaccatggtttagtgaccagggtctcagagtacacaacttgctaggagggtgctctgagaccttttcctttttgtatgctgatgacagtatacaggtcaattcagagacaggcaagtaaatcagtattttgataatttatgaggtcaacaacatacaataattaaataaacagttgaaagaggttatatatgttagatatttatgtttgtgaagataacaaaatacaattagagcttatttctaaatatgtgtcaaatacaattttgattgaacaactagatatgcaactcgcttgtgcatcaacaacttctggaaaaatattagaacaagcaaaaaaatcagaaaacacaggggtattttttcttgacatttgtttgcaatcagaaatgactggattgattttggcacaagaactaagaaaaattcaacctagatgttttattatatttatcacaagccattccgaaatgagcattttaacatttcaatataaagtagaagcactggattttataatcaaagattcctcagaaaatattagaaaaagaatacatgaatgcttaatggatatcaacaaaaaaattttgactgttaataaaaagcaacaaaaaagtattcttattactcaaaatgacggattgattgctgtagactatgatgaagtgttattttttgaaacttcagaaaacaaccataaaataatactgcatgccaaaaagcgagtagttgaatttaccggacacttaaaaagtgttgaagtacaattagattatcgtttttataggtgtcaccgttcttatattgtaaatacagataatatcaaagaagttaattttcaaaaactaacaatttatatggaaaatggagaaatctgtccaatctctgtccgtgccaaaactagctttaaaaaatattataatgagcatctaatatcaataggcaacactgtgactagaatatctaagaaatgcaacaatgagtaatgccttttttgaactcatcttcaagcagagtaatcaacaagacttgaacagtctttatgctattcaagtcttgttattttttctctgttttataaccatccagtacaaataagtatgttatccgttttcttttaaatatttgaaagttttcaataaaattaaacattcaattcctacattaatatggataactattctataaaattctgcctgttgttttatagataaatatgcactacctaaaatagttactataacatttaatattattaacagaataaaaataaattttaaatttttcattaatataaatacccgttcttaaattgtatagttgtaactgaagttcctgtataattcttttgtgaataccatgtagtaacctgtttttcacaatatcctgatggagtgtttccagtagaatagctcttatgtgtatatattttggtcttatatgaaagaccttttgtttttgttccataaaatttatcatatactgtttgaacacatgttgctgctatccctgctggagtgctttcctttcctaacaaaatacctaacgctgttagtgaatagcttccaatttcttttgtaagtggtaaattaggattacttaccgtgtttttatatactgtataatcactactctttccatataatggtcctgtaccatatgaatatgttattccacctaccctagattctaaaggttcatcattaaggggcactgttttagtactttctaccaattcattctgcaattgttttggagttgcagacactgtagttgtagataaacaatatgatgtaaataaacttaatgccattaaaagcacaactactttttttctgttcctgatcctattaattttcttcattttttatcctccttcatcatttgttttatgaaagcaccttatgacgtcaaataggtttttctttataattagcatgctatttatttccttttacttttttgcttttgaacctctcgcttaagttcatccggaattaacggatcatatgtaccgaacaataggctttttcctacagaattctcacctattttcataatccagtttctcaagaagttttttctatctaccataatttctcctcaaaataatcgtttttttttattatatcggaaaatatactaatttctcaaaagaagttctaaacgttgagattcaaagaataaacgtaagtcaataattggtatgtgatcatcagtttatgaatatatctgcctgaataaatgttaatctttcattcttacttctatgcagtagcgtatataattaaaaaatcttgagtttccgcaaaatgtaatttaaaaatgaataacttctcctaaagcaccaatctgccagattttaatgaatcgaaaactgcagtattcaggaatagaggcactttaataagccccgtcgtaaccggactttagaaaagttattcttttatctatttaagcgatcagcttaaggcggaattgacgatatgcaggatgtttcgtccgaaactagagtctgacgtcttcttttgcatacgatagtattaagatatgaaaaggggctgtcggttcgtataatgcacgtgcagcgtacatactccagggcaacagcacattcatacagagaagcaggacagtaaaggaaaagaaacggagtagagagtgaaaggacggatccaatttgaaaaggattcgccttttttgaattatggtattatacaatgttccgaatataattgcttactgtgattctgctaaaactaaatatgatatgtgtgtcattgtgtgagtagaacttttggtcaagttgaccaaaagttctacaggcattaattggaagcttgggtcttagggaaaatccctatcgcacatgacataggaaagtgccatttgttggcataaaggcatgttactttatgcgtatcctgttattaatggtcagtaattattgttccaaaggttggatttttgttccaacttctggaaagccaggaaaatcaagggtttgagggtggtccaagagttgaactggtgtgaaatagagggattattttacaatcctgattttgtatgatccaaagtgttggacagtggcacggacaatgaaatgaaccagtgttagaacctggttaaattgttttttaagataaaagtgtaattttagaagttgtgttttttgcaatcagttttttatggctccaagtatatgttagaaggtgaggaaacaaacctactaatatgagaaaggagcctttttatgagagaacagaaaaagcaaaatcttacagatcctaacgtgagaaaaagatttgttacttacaaggaagcagcggaactctatagtatgggactgacgagaatacaggaacatacaaagatggcaggagcaacttataaaatgggtaataaggtgcttgtaaatacggacatctttgaagcgtatcttgaacaatatagaattccaggagattatgaaggaatggcaaagaagtttactccagatcttgtggaattgtaccaatgattatctcgaacaaatgttaaacaaatgttgaacatttaatcgttctattgtataatatttgtatgatgattcggggaggtgttaagcttatggcaaataaagacgggagaccgccagtggatgatccaaaacagaaaatcttaggggtgcgggtaacggtcagtgatcatgagaggattaagaaatacgcagccgagcatcataagacaatatcacaagttgtaattgaaggtctagatcttttatgtaataaagaagaaaaagacaactaaaatggacaactactttcctttccgagaaggagagtaaaagcaatggcgaaagcaaaagtaaagcagaggaaggacagcaaaggacgagttcttcaaaagggcgaaagccaaagaaaattagatgggatgtacatatatacatatgtgaatccctatggaaaacgttgttatgtatattccaaagatctttttacactacgagagaaagaacaagagttaattaaagcccagatggatggattggattactatgtaggtggtcatgcgacaattaacatgacatttgacagatatatgagtacaaaacataatctgagagaaaccacgagatccaattacctgtatatgttcaatcgattcattcgagcggatttcggaaataagtttttgactgaggtgaagtatacagatgtgaaattgttttattatcatctgttaaatgagaaggatattgcaatcaatacattagatacaattcatactgtattacatccaatctttgatatggcagttagagacgacattattagaaaaaatcctacagacggagttctggctgaaattaaacgaaatagtggaaagaataaagggattcgacacgcacttacaattgaacagcaacaagcatttatggatacgatcagaacatttcctgaatattatcactggtatccattatttgcaacattacttggtaccggaatgagaatcggcgaatgtacaggattaacttggaatgatgttgattttaaaaggagatgtattagtgtaaatcatgcagcaacctattatacaagaaatggagttgcaggatttgcgatttcaagaccgaaaacagaagctggtataagacagataccaatgatggatgcagtctataatgctttgaaaaatgaatatgacagacagaagaaagacggattttgtacctatgagcttgatggtgtttcaggatttatattctcaaataaattaggtttgcttcataatccacattgcgtaaatctggcaatcaaaagaatctacgaagcacataatgcaagagagattatagatgcgaagagagaacacagagagccgatcattatcccacacttttcctgtcatgtgttgagacacacattctgttcacgtttatgtgagagtgatatgaatgtaaaagttattcaagagattatgggacataaaaacgttgaaacaacattagatatctatacagaagtcaattataataagaaaaaagattcattagaagaattagcaagtaaaatgcaattcttttaatctcagaaaagtaaaaggaaaggaattcaattccagtacagccaattttgagatttgaatctaatataatggaaaaatcattatacaatgagtactacaacaaaatagctttggtacaacgcaaagtacaacaaaagggtaatctgatacgacctgatataagtttatatggagaactaaaacgtatatgaaagctataaaataaagggatttacagagatataacgagtttctataaagtaatcccgacaatgaagagtcttgactctgacaaaaaagcaggaaaatccggagcagtagaagaagcaactgcaaacgacaacaacggattcttcaaagacaacgcgaagattgacttctccaacgtaaaggttgagcctttatttgaagaagaggttgatttcgatacattcagcaaatctgatttccgtgccgtaaaggttaaagagtgtgtagcagttccgaagagcaagaagctccttcagttcacactggatgacggaacaggtattgatagaacaatcctttctggtattcatgcatattacgaaccagaagaattagttggaaagacacttattgcgatcactaacctgccaccgagaaaaatgatgggaattgaatcttgtggtatgttgctttcagcagtgaataatctgaaagattcagaggatgaagaactgcatcttgttatggttgataatcacattccggcaggcgcaaagttatactagaattaaaagatatcaaaattcagaaaaataaaatcattgatttaaagagaacacgtttagttaaaagtagcagacaattaatgcctgctactttttttataatagttatatagtttggatgaaatcacggagatattctgtaaattaggacttcgtatttgtaacagctttgctgatttcagtggaaagccgagttctgataatgatattcaattgatggtttattccatacgggaataaatcttcatcaaatctttatttttttctgttaggttatatttcagtaagaaatgaaatatagaaggaaggatagtaaagatggaaatgatgttacagacacaaaatctatgtaaatattttagaaaacagaaagcggtaaataatgtttcacttaatatcgaaaagggacagatttatggactgcttggaccgaatggcgctggtaaatctaccacattgaaaatgctgaccggtatgatgaaaccaactgcaggaaagatttactttgatggaaaacttttggataggaaagatttatcaaaaataggagcgttaattgaaaatccgcctatttatgaaaatctttccgccagagagaatttgaaggtaagacaattattgcttggtacagatgaaaacagaattgatgaggtcttgcagattgtatcacttacaaacaccggaaagaagaaagcaggacagttttctttggggatgaagcaaagactaggcattgcaatggcattgcttggagaaccggaacttttgatattggatgaacctacgaatggattagatccaataggcatcgaggaattacgagagctgatccggtcttttccggaacagggaatcactgtaattctctccagtcatattctctcagaggtacagttacttgcagataaagtcgggattatttcaggtggaatcttaggatacgaaggagcattaaagcagggagataatcttgaagatttgtttatgaatgtggtaagaaaaaaccagaaagcaggtgaaatccatggttaatattataaaagcagaacatcaaaaagccaaaagaaccatgcgaaaaaagtttatctggggatttcctcttcttacatttgtcatggcatttatatttactctcgggatgacaaatgcttatgcagaaagtgtttggaactggtggtatacacttttgctgccggggatgattgctctattttgttatctttctgtggcgcaggagaaaaagataaaatactatcatttaatgactattcccacagacagaagaaaattgttgctggggaaaattatttatattgggtacatgattttgttttctaatgtgattgtgtttgcaggagcaacgcttggaggctttcttctaacgacacatgttccagttggaggagcgttgattgcagtattgtttctgacggtttctgagttatgggagattccggtagctttatttttaagtgaacgatttggaatgattgtaaacctgttcgtctgcctatttattaccgtcagcggtgtggtaatatcacaaaccagaatctggtatgtacttgtttctgcaatccctatgcgaatgatgtgcccgttgcttcatgttttaccaaatggacttgccgcagaagcaggggattctcttttggatacgggagtcattgttccgggaatgtgtctctcaatcatctggtttgtttttgtaacggttctgtttttgaaatggtttgagagaagagaggtgaaataagatgattggaagatctcttaatgcagacttgcgaaagatgaaaggaacatctgtgattctggcacacttactgattccgattataaccagcgttatatttttaatatattactttttttcaccatggaatgaaaatatgaaagtgattgcattttatcaggcaataggagcaggacttccggtacttattggaatttttacagcaagtgtgatggaacaagaacaaaatgcaggtaattttcaaaacctgttgtctttaccagataaacttacagcatttttatcgaaactgttgatgctactggttttgtgtctgtgctctatcctattgacagcaatcatattcggaattggatttggaagaatcgcatcaagcgatatcgaaatcatgaaaggatgtatatttgcagcattgctgctgtggggaagcagtgttccactttatctgtggcagctgattctggcttttcagtttggaaaaggggtatccattggagcagggattatatcaggactaattagtgcattgatgcttaccggacttggagattatgtgtggaaatatgtatttgtctgctggacaggtagagtaccatatacttatctgcaatctgtattgggagaaactagtgtaggtgaatggttgtcattcataccaggttgtttaatatttacagggattagtatggtatactatttttggtgggtaaaccactgggaaggaaacagaatatcggaatagaatcgagggaaactatggcaaaaatactggcagttgatgatgaaccggcaattttggaaatgatagaaagcattttgaataaggatggacatctggttaccaaagtaagtaatccactaaaaattaatatggaagaattacatcgttatgacctgattttactggacattatgatgcctggaattgatggcttcgaattatgcaaaagaattaggatacttgtggattgtccgattttgtttcttacggcaaaaacggaggaaaacagtctggtaaacggactttctttaggagcagatgattatatttcaaagccatttggagtgatggaacttcgggcaaggatcaatgcacatcttagaagagagcacagggaacattctgtccggatggttttggggagggtctgtattcaaatatctcaaaagaaactattggttgatgataaggaacttcctcttacgaaagcggagtacgaaatctgtgaatttctggctaaaaacagaggacaggttttctcgaaggaacagatattggaagcggtctttggctttgacaatgagagtaatgacagtactataatcacgcatatcaaaaatataagagcaaaatttgcggattatgattatacaccgataaaaacagtctgggggattggatataaatgggaagagtaaagagaagcaatgcactcagcaggatttttatgagatatgtactggtcatgcttggatcattagttggtttggtgattgttacttatctgctgctgtaccttttgattagtgtgggctgtatttatccggcaaattatgcagagcaaaagattaatgaagcatatgatacgattctatgtgcagataaagtgactgctgagatgattcccgcactttgtgattatgtaatcttttcagagagtggagagaaaataggtggagatctgccagaacaatacgaacagatagcatggaatgttgcaaagtacggaaacgcatccgggaaatatttttataaagtaattgtaagggaaaatgaatatgttgtattgcaatatcgcctgacacctcaatatcattcagcttttttgagggagcattttataggaccacagaatgtgatgattattatgtctgtgattggagcggtagcgattatcatcattccgtccatacgttttggaaaaagaatcaaaaagcagatgcagcctgtattagacgcaatcggacaaataaaggatcaaaatctggaatatgagacatcctgttccggtatcaaagagtttgatgactgtttatcggcaatcgatgatatgcgagatgcattgcgagaatctttagaaaagcagtggaaaacagagcaggaaaagaaacagcagatgtctgctttggcgcatgatattaaaacacctcttacgattgtacggggaaatgcagaactactttcagagactgaactgaccacagaacagaagaaaaatatcacttatgttttgaacggcacaacacagatacaaagttatgtaaaacagttgatagatgtcacaaaatcatggaattgcagtgatgttacctatacaacggtgaggttagaagattttttcgcagatataaaggaacaggcactcggactggtagaaagctatcaccagaagatagattggaaggcggaacaaagtgataaaaaggtaacgattgcttatgatccaatgttccgagccgtaatgaatgtgattcagaatgcagtggagcatacaaaagaaaatggaatcatttatattgacgcaaaggagcaggatgaccggctgacattcattgtggaggatagcggatcaggatttacaaaagaagcattattgcatggcacagagcagttttttatggatgacacaagtagaaatggcgaagcccattatgggatgggactattttttgcaaaaactgtggctgaaaaatatggtggaggtattaaactttcaaattctgaaaatacaggtggggcgagggtagaaatatttttcctgagtagtcaagaaacaagctaaatagaccgcaattaagctatgtaaaagaaattttacatgcttttatctaatatgtaaaagccttttgatagacattattactactctaagcacaaggaggttgaggtttggctatgaataacagtttagcagaagtacatttcctgaaaacccaccctgtatatgaacactggtatccggtctttgcagtaataataggaactggacttcgtgtgggggaagtaactggattgagatggtgtgatattgatatggaaagtggaatgattgatgttaatcatatgacggatatacagattttattttcatcaatcgttttggtcaggcacagcaccaagccacactcaacaaagcaatccgaagaattatccgtgattgcaatgatgagcagtttttgcacagtgatgaacctgatgtgttacttcctcattttagctgccactcgcttagacatacatttacaacaagaatgtgtgaagctggagtaaatataaaggtcattcaagacgcactcggacattcagatatttcaactacactgaacatctatgctgatgttacaaaagaaatgaaagcggaagagttcaaaggattggatatctttatgtatctttaaacgcccaaattagaaatattactcttcttcactcttcttcaacttcgaataataactatccgcagtataaagcgccgccaccggattatgccccaatacacggtctttcgtcactgctgtcgtagtcagtgcctcggaatatttgtaaaacagactgtcatgtcccacacaaagtccgaccacaacattcaggtccgtcttcgccttgttcagaagctttgcctgcaggatcggattacacatattcacaccgacaccttcgcagcattcagggatgccgaccgatgtcttcttctgtgttccggctttacagccgacaccatacacctcaaagccatgtctgcgcaggatatctgccaggatacggctttctttcaacaatccgacacaggttgcgatcccgatctttttcgcattaatcttctttgcaaaatccatgatttcttcgacacgggtatgtttgcagtaattctcatactctacttcagctgcagcgattgttactttgcggttctcgtcttcattgtagcattccatagcttcatttagaacttcttcatccatgtgtgttgtcagacagaaatccggataggttttatccattttgttgcagttttttactgcgcagtcgatacaggacatgtcttcttttttcattttttcattctccttttgtataccttggtatctacagaggcctgccactggcagattctctagattaagctttactttgtaaaatatccgctatttacttcataataacaaatacttatactacagacaatggttttccgtttttattttcttattttttgtagttcttttctatgagaaacgttccccgattcagggttgatttgtcatgaattgtcgattctgatttttgaaaaattattgaaaattatctttttcaatacctcagccgaataccagctacatggaagccaataaaccatgcaacagcggttcttttattcgccagtatatgcaatttctatctcatagccgccgttctcatagtaggcgtgagaaaaatagtatcttattgttatttctgaaatataaaatttgaatcataaaacttctttccctctcaaatccatttttaccaaaccaactactaacaatccaataaaaattgccgtgtccacaaatagcagtacaacaacactttttaccactccgaaagtaaaaagtatggagaagatttccactgacaacacaataaaacacatataatttgtcaaatactctgttataatttctccataataattgttcatctgcaatttcgcatagataaaaggttttaataaataacggattatgatacatataacaggacaaatagaaatccagtttttattaactagggatgttgccactcctttactccattgtactggaatttctgtcggcaacttagaataagacaaagccccaataatcaagcatagtgcggtaatcatagtccaggtaagcatacttccccatatatacaaaaagctgacggaatccagtttgaaaacagttcgattatctttccaatagtcatgcaaatctgttacatattgttctacctgtaatttttcataactaatactttcttcatccagcattttttcacacatgagtttcgccttattcaaatcagtaatctgattttttaatacttccttttgcttctcaagcatttcctgcaatgttactttttcggatataatacttcgtatatcttcaatagaaattcccaatgtacgtagatatgcaatcttctttatattttccacatcattttcagaataatctctataaccattactttcatttctcgaaggctcaataagtttttccttttcataaaaacggatattagaacgggataaacctgtttgctcttctacgtcttttatagtcatattatgccctcctttcgagcaactctattttacttaataataagctataaacaaggtttacagtcaagcatttatcaaaaactaaaaaaaacagcaaaatttgtttcaggatttaattcattttctaaagaagaacaggcattgtatgataaagctcatatctctcgtgatataagaaatcagtgctttatctgttattaagggcagagggacaaaaagcctctctgcccttaatgaacaaagcacgttcttttagaaaaatttagtcgttgacagataacatatcttgcattataatacatttaacaattaggttaaatgttaaatgaggagcgtgatgaattcttgggtatacaagatacattaaaagcactggcagatccaatacgacgtgagattttaaatttattgaagaatggacggctttctgctggagagatatgtgaacatttttcagtaacgggagcttctatatccagacatctggcaatattgaaggaggctgatttaatccgaaataaaagagagggaaaatttatttattatgaattaaacacttccgtattggaagatgtcatgttgtggattatagatttgaaaggagtatcggacgatgaaggaaatgataaaaaaatatagaggttcattaatttgttctgttctggtaatgctcatcggggttttagtaggattcactagtacacagagcatgtgggcaaatgtgttttttgtagtgacggattgtgcgctggtggcaataatattttatgataaccggaacagacagcagagccgcaagattataggaatgacgatgtggattataccaattataacattactctataatggtattacaagactggtcaatatgggtgcagatatggaaaatctgtttatggcagtaatttactatggaactggactgctgtttatggttattggaaattatttgccaaaagtgaaacagaataataccataggaataagagttgtatggtctttaatggatgaagaaaactggaatgcaacacatagattcagcggcaaattatggatggcatcaggtattttatgtatgctttgtggactttttggggaaagcatggctgcactggttgtgtatattataagcattatggcagctgcaatcattagcattctctactcctaccttttttataagaaaaagctggcaaccggagaaggcttaaaaattcagtataatacaaaaaaagtgtgatatatctgatcatcgcaatttcaactattgtgtttactatatggactttgttttgtggaagcattcagattcgttgtaatgatcgtgattttaacattgaagcaaaaggatggaatgattatacagtggagtattcgcaaattgacagcatttcttatgaagaaaatgtattgcagaaatccttttctcaaagggctttttctatttcgtgtgtccagcgaagctggaccacacttgccggtgaaagtccggtcacggtaatcgccagtgagccgtgtagctaaactcggtgcgttgtagtaatacagggtgctaagcgagtggataaagtaacctcgacaagaggagcgagcaatcatgcaggccgtaacattaagtgaattctgccgtatcgctaaaaaggtctctgataggagagcaaagagaagttgagccctgggtatatgggcgaaaaccatggaacgtgtgaagaaactggaaagcagcacggaagaatctctcggtatagaggaagcggtatgtatgaaaagtgtggttcggaactggagagaccctacccatcaccaaaaggtaaaaagaaagcgtataagcttggcgaaatcgtatttctgatgggagggagtcggagaggaacatagtaccgataatgactgtgcaagaaaacgcagtttatgggaaggttccttacttcattcaagtttgtagagagggtaagagtgagagaatgtcatgcagactaataactccaaagaaaaagttcgacaacttcaaaacaaactatatctgacagccaagaaatgtgacagccgaagatttcatgcactgtacgataaggtgtatcgggatgatgtacttttcgaggcatggaaacgggtaaaagctaacaaaggttccagtggtgtagagggaatcagaatcgaagatattgaagctgataagacaatggttagtatcaggagtattatacggaaatgtactgacaatctctgaaccgggaacaagccaaggttcagttatatctccgttattggcaaacatctacttaaatacactggacagactgtgggaaaagtatggacttactcacggtattcttgtaaggtacgcagatgatacagtaatcatctgcaagaataagaaaagtgcaaatcacgcactgaacttattgcagtacatcatgacaaaactggatttaaagctacacccagtaaaaacaaagattgtcagcatgtggaacggaaaagaggaatttgactttcttggaatgcaccacagaagaatgacaacggaaacaagcaaaggacaattgtataaagaaacttatcagtatccgagcaggaaagctatgaggaaaatgaaagtagaaattaaaagaaatgtaaacagtcgaagtctgctgattgcaaaggaagaggatttaataaagaatctaaatccgaaaatcacaggttggaagaattattattccaccaaaacaaatgaaaaatggatgcaggcattggactggtacattatctgtacctttacaagatggtataacaagaaacaccaaaggcgtaaacatatgtcaagaatgggatttgttagaaatagcatttacgaaaaaggattaaagaaaatggctagagcatgacgtaatgctgtagaaagaagaatgttggaaagccgtgtgagggagaacctcatgcaggtttgatgaggggcggatgaaatttctcatccgcctactctaccctcgaaaattgagaattacatatgttcaattctttgtattaggtatatattttgaaaagttatccggttatactgacaatatcaaaaggcagaactgttagaatgaggtgagcagatggatacagcacagcgaataaggttaattcggatgattgaaaaaatagagaagaacccagaattcagtagtaaaatcggtgtgagaaatacatctgagtttatatcaagtaaacaatcaaaaaaatgaatgattcaaatcataacaggagtcagaaggagtagaatatgttatcgttactatttgctatatgcataatctggtttattggaaaattttttatatttggtgtaaaagcatcctggggaatcttaaagctgctctgtacagttgtatttttcccggtgattttgataggaatggttgttggtggactgatttatattgcatttccgctattgatcgtaggtggaatcattgcacttataacatctaattcataaaaattcggaggggatattatgggatatgatatagaaaaagaaaaacgagaagcgattgaagcaggacaacgagcgttaagtagtcttcggatagcaaaagaaaacctgaacagtgcaaaaaattggggcttggtggatatgtttggcggtggattcttttctacgatgttgaaacactccaagatggatcaggccagacaaaatatggaacaggcgaaatatgatcttcgtaattttagtagggaattaaatgatgtgaacatggcttgtaatttgaacatcaatactggagacttcttatcctttgcagattacttctttgatggatttgttgtggattggatggtgcaggatcgaatcaataatgccagacatcaggtggaagaagctatccgcagaacggaatacatcataaaccagttacagcatatgtaaaggaaagaggcagtggaccataaataggttcgctgccttgttttttcatacttatttttgtttctttttttcttctctgagcaattcgatgtttagtccctgctctccggctgttttatcaacccagagattcagagaatctattgccagagaaatctcatccagtttgttactgataaaagcaaaatccttgatctcatcatcgctgatcttaccgtcacgggcaatctggatcagacgtgtggtaagaggattaatctcattcagactggcaatggtttccaggattatattggataagtcagaaacttcgacttccgggacataacgatgaccgatttcgcatttatgagagcagtaataattgcagagatctggtcgcccgtaagcgtctgccatctggataatatcgtaaggtgtaggttcctgcatttcatattcaaatttttcaattttagaatcagaaacagcagtcattttttcgctggcttctgatctggtaagaccggcttcttcccgacaaatctgataaattgtcttattttctcttgtagattgtttccccatgagaataacctccccgtatatcgccgaacatgaggattatcaggtgttaagtccacatgctgtgcgtgtatttcctctatgaattttattatacttgaagcatcagtaaacaacaagagatattagacctcgcaaaatgtggaatctattatgaaatgaaagaggaggagaatttgattatggcagtagtaacagaagcatttgatattccaatggatatcatgacaaaattggcaactggagaatatcgcagactcggtggagttgttcgagttgcaattggtccaaataaagggcagattgtaaagcacttggatccaataaaaattgaacaagtagcacaaaacaaaaatgttgtaactaaggtgattgaattttcaaagaaaaataggaaagtgattattatcggaacagctgttgcagggacaatggtagcaggaaattttgttcatcaaaaaattaaaaacagagaaccgaaggtaatgaagagatatcatgcagctttgagatcctatattgaagatattcgaaatggtgaactaagtatgaaatctatcaatcgcctaatggatgctttagaagagctgaaacaagataaaagatatgaaatgttgaagattgaattgactaccgaagaattggatgtactggtaaatcgtatttatgaatacactgttaaattagccagtgataatgcagtagaattaactgatgatgagaaaaaatcttctgacaattcaattctgaatttacagagatatttaaagacgcaaaaacgtatatttaaaagtgttgcataaacccaaagatagcaggggtttttataccccatctattgatatacactgtaaccatcaaagaagattaaatcataaaattcaaagaaatggaggagttggcaatgaaaggttttaacactgttgatggttacatgggattggtagatggtaaatatatcttgtttgctagtgaatccgattactatgaatacatgaacgattaaaggaggagctgctatgaaacccatccatgtaaaactcttttcgcaggatgcttcgaccggattcatctacaatctttttcccggttttttcattgtgttcaaacagaagataattgatagcagctgagtaatttgcatttctgcttttaatgtgttttacgattgccattcataccacctgccagtttcagtacttcttttctcaataggaataagtccgtgatgcactgatggatttcattttctatagcacgtgactgactgccaccgctgttaaaatgcttggcgatctgattgagattcgatccgatttttccatattcactgaccagttttctgaggtcgttcatgtctgcaacaacttcaatctggtgattgatttgcttctcaagcagaagttttctcagatattcggaatgagaaagtcctgtaacgtcagcagcttcatttaatactgccaactcaatatccgttagttttaatgtgatgatattacttctcttgagattcttttctttcttctttggtgccatagtcctccttcctttttgataagacatcctggatatgcgattacactttttaaccggctgtcccttccagttatagttatataaagtgctgccactatctttgatagagagcctacagatatctttgatgtctgtacgagggtatggggaatcggaatccccatcaagagacttacccggaggtatgccgtagccataaaatggcgatacggtaatacctgggtggatcttgctctaatctacgaaccctcttacatatacaaaagatggagggggaaaatacagggtgtgagagaaaagaattttagaaaaatcaaaataactcaaaaacttgacttttaacattgtcaaagttaaaatgaaagaaaatgagttaaaaggagaacgagaaatatgtttacaagcgtattcgggatttctataaaatatgaagcatggaatcatcaggattctttgcctgtttatattgcagggagttatgattttcatacagcatatattggaaacagacgctgtataatgcttgctccaacagaagaacttgccacacttccggcattgaaaaaacaaattgtaaaaatacagcagattgataatgtgccagttgtatttgaacttacaacggtatcaaattatcgaagaaaaagccttatagaaaataatataccgtttattactgataagcaagtctttcttcctttcattgggacaatgctttctgatgaaaaagaaccccaaaagctgacgggtaagtttgtttactccacgcagcagttgtttttattttatctgtacagtaagaaaaaacgattgtatatttcagaagccggaaaagtgcttccatttacagcaatgaccctgaccagagcagtaaaacagttggaagcgacggatttatttcttgtagcaaaagacggtgtcaataagtttattgagtcaaaatataagcgagatgaattatttaaaaaagcaaaagtatatttgacgactcctgttcgaaaaacaggatatatagataagacgcaagttacagaaaatatggtctttgcaggggaaacggcactttctgaaaaaacaatgctaaatccaagtcgagttgttacctatgcaattagtgagaaagattatgataaaaccttgctgactgatgaattgatagacccggataaacagataagacttgaattatgggcatacaacccgaaacaattttcagaggataacagtgctgatgatatttccattgttttgtcttttgcagatacaaacgatgagagaattgaagaggcagtagatgaattacaggaaagaaggttgaaggagtaatggtcagcggatttacaaaatttaaggaaagatttcagggctttgaaaatcaatatgtcatcatcggtgggacagcgtgtgatttgattatggaaaacgaagaattaccgtttcgtgctacaaaagatgtagatattgtactgattgttgaatccataacagcggagtttggcaggcagttttgggagtatgtcaaagaagcaggatatgagcatttgaataaaagtaccggaaatgcacagttttatcgtttcacatctccgaaaagcaaagaatatccatatatgatagaaatattttccaaaaatccagattttattatattggaagatgatgcagttctcacaccgcttccgatagacgatgaaatctccagcttgtcggcaatccttctaaatgaagcgtattatgaattgctaaaaactggacaaatgatggttgaaggcattccggtattaagtccgacttgcctgataccatttaaggcgaaagcgtggctggatttaaaagaacgcaagttgaatggagagcaggttgacagcaaaaatataaagaaacataaaaacgatgtgttccgattagcacagttaatcacagtcaatacaaggcaagttctcagttcggaaatagcagaggatatgaaaaagttcttatctgaaatagctgatgaaacagtggatttaaaatcattaggcattagagggacggataaacaaaaaattatagatatgttgtacctgtgctacaatttgaacgataatacataatttttctctaaagtcaaaaaaattgcatatcagagactgtgatttcaggatgtaaagaatacattttgaaatcacagcctttttctttacagaaaaatagttttgtaatcgtatgcgccaaatagcagaaagctaagacggaatcaacacacatgcacaatatcccggagctggttgaaaacagtagatggtcagagtcttgtcgatttccggactataatcatgcaggatatgtttattgccgtttaacgctacatctgcataagtgacaagccattttttatccccgttttcaaagacttcataaaatgaacgattcaacatttctgaaacgggaacgccctcaacaacagtcatttcatcattacagtaacggaatacaaagtctacaccatgtccctccgcatcaaatacaagttcaataatacaaaaagcaagtggcatatcattgagaaagctacagttatcaaataattgaagagagctgtcttctgaaacctccgaaaggttctgcgtatttaaaccaagttccttacggatctgtttgtgctgactcagattacgttttctcccttgaaagacagcaccatccgtcattgtataaagtccttcgtcagatatatgaacaatttgattttttcgaagaacaatgccctttgagatatttagaaaatcttcttccggcaagtaaagcataagttcttttatcgggattgtagtcgtaatgctttctcccgaggaaagcgtaatgattgtgtgaggattctgtctggtaaggtaaaaaatatctgaacttttgatattctttcgttcgaaatatagtggaacattataacgcatatgagaccttcctttattgtgataattttatattactatagttgttttgaaaatacaatagaaataattaaaatgcaataatcaatgaaaataaaatgcactttaattgagcttcacaacaatttatctaagaaacattaaataaaagcgcagatttgagcaaaaaagattgctgattaaccgtgtgagtggtattataaaaaagtataaataatgatacaaaacgaatcatcaggcagagaaatgaagttaagatcgttgatcaacatcttaaagagtatgatgcagaaatagagaatacacttcagaaaatacagtacacagaagcgaaaaatgagctgaatcagcaatggtctaaagatatagatgtatatgaaactgccggaaatgtaggaaatacattgagcgcctatgaagattatatgaaagccgcgcaactgtatatggatggtaagacggatataaatgctgtcgaaaagagtaagcaaaagctttatgacaattttattgaggtttataaagcggctggaaatagctttgaaaatccaaccgatgagaaaaaaaggacgctatattttgtaatgacacgatagatggtgtattcaaaagatcgatttggagtatgatcaatgcgttgaataagccgagtgatgagaaaaattatgcggatgctgcggcacaatttgcatatagggcttatggattttctggtgatcaatataattacatagtttcaagtattgataaacaatttatggaaatcattaagatggagatgatgtatcaggaatttattgcacagcgtggtgattattttgaagagaaatatccagatgatgaaagtaaatgggagagctatgctgcatggacgaatgatttaaataagttgaatgaagatgttgccaaagctatggatactatgcttgacagagaaatattagtttcggattcaacggttggttcgattcggatgaaattggatgaatttgtaaagccagaagacatggtatctgtacgtatgaaaaatgaaaattaccatgagaaattaacaggcgagttctatgagaatgagcaaccgattatcgatgcgtttaacgaaggttatctttaccttattgaggagtatggttggaaatccaatgctgatgtaattacgccgtttattaattttcacagaattgctgtgccgacacctaaaacggaggagaatccatcgggaatagatatttattatattttcgatacatcacagccacacgatgcggaagaggattgggcttggaattcagacgattctgttcctgaaaatttgcggttttatcaatttgaagagaaaatagatcttactttggcgagagatcaacatattccatcttgtgattttattaatttaacaaaagaaaattatagcgatgggcagaatcaatttagttgcgcgaaaagtacggcggaatttcagagcttattcgctacaggactattcagtgcattatcaagtatacctggtgattatctgagtgaatacctgcttacaaaaaaagatacaaaaacatatattgctttatcggattatgattttgattatcatgatgcatgggcgacaagctatacgattttccatgtggttgatacaacaggacagtatccgggaagcagtcttgaaagttctactttaagtgcagaaaaaattcaaccggataaatcagcgggggcatattcggcatataccgttatattaaagaaccgcccacaagaagatggttattataagacgaaagttgatgttgctacgaatggagtcggagatacagagttagaaatgattcaggaagatgggacaacatgtcaggaaaatactgttccttcaggaaaagaggtaacacttcggtttaaggcggaaggtacaactgttctggaatcccttacattgcagagacataacaatacagaaaatccatcagaagtaacttcggaagaaacgttgttgacaaaagaccagatcgcgacattgagtccggatgaagaaggatattacattatactataatgcagtctgcaaggaacattcctatgacaatggattctgtacgaaatgtggtggatatcagccggcagactataatgaatctacaggcagttatgagattgggaatggtggacagatgttttggtttgccgctcttgtaaatggggacggtgaacatacacagattcaggaagcaaagccagatgcacatggagtgctggtgtctgacatttcacttaagaatccggcggatgaaaactatgaatggaaaccaatcggagaattcaaaggaattttcgacggacagaatcatacgatttctgatttcagtatgacgaaagtaaatgatcagtcaataggctttttccagaaccttatgagtgacccgaacgagacagacgaggcaaagaaagcgacgcttaagaactttacactgaatggaacaatcgttacaacagcagaggcggcaagtgcagtaggtggtgttgtaggaacaacttccgacagtgtgatcaggcgggtgaattcaaatgtaaatattggaagtggattgatatactatatcggcggaattgtcggagagatcaatgcagcaacttctatagaggagagtacatattcaggtaagatcgtactggattatagtttctacggagtcggtggaattgtaggttttgtaactgatgatgatacatatgcaggcagcacaaaaatcaaggattgtgcaaattacggattgatcacatattataaagtggaaaatcacggaggacgtggttacagcggtggaatcaccggacaggttgcattgggtgaagaggatttcattctttctgattgttacaattatggcagtgtgcttgctgaagagtggaaggaaatctatggtgcaatttccggatactgtgcggcgaagaaagatggaatcaagaataattattatctcgatacacttccggtaaaaggtttcctgggagaagctgagattgcgaatgatgaagaactggcaaaggcaaagacagcagaacagttcaagagtggtgaagaggcatatcttttaaataacgaggtgacagacggctctcaagtatggtatcagaatattgataacggagaaactccggatgcttatccggttctggatgatacacatggcacagtctatcgttgggaagatggaacctattcgaattatgagaaagaacctgtagaagaaacttacgagattcgtacatttgaagaatttaagaaaattccggaaattgttaagaagaacaatcgtgcaaacttcaagctgatgaacacaattttcggaaacggtaaaacaatgacagaatcaatcggttcagcagacaatccgtataatggtacatttgacggacaaggatattatgtctaccgattcgatatcaaatcatcagatggaaatgcagcactttttgatacgatcggtgcacggggaagtgtaaagaatttcgcagctttttatcaaaatattgaaggagagaaagcagcaggtctagcgattgtcaattatggattgattgatgagtgtatcagtggatcaaatctcagcggtccatttactgatcaactcacgcatgagcctaaaaatttgacggagacaacgacatttgttaagggcacatcaatggcaggaggcgttgtagttgagaataaaggtgtgattcgaaatactgtgaactatgcaaaggcaacagcaagtgcatcagatggaattgttggaaagctggataaaaatggttccattcaaattgcatatagtgcacaaactgcgatagaaggtgggacaaccggagcagtatttggcacaaaagaagaaacagcaggagctgtaaataacacatattaccaggataccttatcaggaaacgaagaacagggaacagcgaaaacagcggctgagatgaagagcaatgcttttaaagaggaattgaatactctggtagcaggcaatgaagaattgtgtagttggacatggaattcaacaaagaatcaggggtatccaagaatcttatcttcgcttattacggaagttgaattagtgaacgcatcaagaggacttaccgtaaaaggtatgatgcataaagatacgaaacttcagttgaacgagcttgacaagaagaatgacatttatcaggcatttaagaaatatgcacagaagacagataagcaggttctttattcagcagaaccgacgttggtatatgaagatggacagccgtctgcatacgaaggaaatctgaatgtaaaactggatttgtcaaagtatcgaggaaaaggatataaggttcttgtttatcgaaataatcagatcgaagagcttgaaattgataaacagatgatcgcctcaaaagatgtagaagagatggttccgtttgctgtactggctgaaaagagtgagatctccaaagcagttgattatattaaggatacagtaaaaacaggagataacagcagtgtgattcttttgttttgtattgttgttgtggcaggtagtgtagcaggtggagttatttactggagaaaaaagaaagcaaaaaaataagatgaaaaaaaagacaaagattataatcggaattctgattgcggctgtgatagcagccgcaggaattacctggtatgttatgaaccaaaagaatcagaaaaccggaaattcgtctgcagaagtagtagcctgggatgtggatatcgaggaggaagaaccttccgaggaaaaaggaatcctgattccgggatatacaagtatggtaatgaaggcgaatacaaaggagcagacagtaagcattggtaatccggcagataatgattgcatttttgtaattgtattgaaactggaagacggaacaaaactgttcgaatcacaagagttaaaaccgggagaaggtctggagaatattacgcttgaccaggagctggaagccggagagtatcaggcagttatagaatataagtgttattcattagaagataaaagtccgttaaacggcggaagcgcagagtttaaattatatgtaaaagaataaaacgtggaggtagaatgatgaaaaagaaagtagtagcaggatttatggcagcaacgatgatggtatctgttatgtcaacaggcgtttttgcaaaagatcttgacccgtccagtgagactcaaagaacgggagatacaacagtgactgcaacagtggaggaaaatttaaataaagcagattatattataagcattccggagaccgttgattttggaaaaatacagcagcctgagacagaaggaaatgcatattcttacaaagatatcactgtatcttgtataaaagcagataatctcggggcaggaaatggaatcgctgttttagtaaaagatgtgacagcagctgaaagttctgatccgtttctcctgacacataatacacattcagattgtgctctgacttatgagattatgaataacaacgatgagagtattcaaaatgggacatggtatgcaaatggatttttatttaatctatttacgggagcagatcagtcagcaactgacaaattaagactgaaccgtaatcagttatataataaagatctttctgtctggggtggacagtacaccggtacacttaatttctatacaaagattgtagatgtacatgcacaataaaaaagagtggaataatacaagaaaaagcttgcttagactcttttttatgtcgctcgttcttgtatgtatttgtactttatcagttccaaagaaatctctggctcaggagacaacagattctgcaacttatgcaggaagtaccagcgtaaaagcatatgtgacaggaaattccgtgaatgagcaggagaaccatcccgaagatgaggagaaacatttacaagacgaaagcacaacaaatgcgaaaacaggagatgagagcaaagcaacaatttggattacgatattgatattctcaatgcttgtatttggctgtggagtaaaatataaaaaaggtaacaagtaaataaaaatttgtgttatcatagaaaaaacaaaagaaatgcagaaatgaaaggggcagcaaaaatgaaggagaataaaacaattaaaattatcacaatgatcacgggaattctgacagtgctgttaggtttttatgcagtagttcgacctatgagaacttttttagcaatcggatggattcttggaatgcttctctttgtaaatggtattgaacttgtggtactttcattgtccaaagaaaagaaggatatcggaggatgtattcttggagtcctggaaggacttggcggtatcattttattgttcagcggcgtacagagattcctgacagatatcatggcaacttatctggttggtgccagtgtcctgatttatggtatcttccagattgtagccggagtgaagaagtttcaagattctaagggaaaagcaattttagcaattgtttgtggtgtgttatccattattgtaagtattatagcctttactcatccggtattgactatgttctcagttggatatatgatcgcatttgctgttttaatgcagggaatcaatatgatcgtacttgctgtgaattttggaaaagagagtgagtaaatcaaagaaaaatagtaaatgactaaaagaagagaactccagtaaaatgagagttctcttctttttttgttatggcaacagaaatacaaatcacaggacaacaagtaaaactgagtttatctgtatgaaaaatatgcttgacgcaatatattgtctgaatttataataaaaaagtataaatcatacgaaaatatggttgagaggaaggaagaaacggcgatgaaaaaggaatatttggacaagattgcagaatatggacagttaattgttgtttcgggaccgtctggtgtggggaataagacggttttgagagagtatttgcaggatcatgaacaggcgtgtgtcagtgtatctgtgacaacgagaagacagagaaagcatgaaatagacggaaaagactattggtttgtgtctgtaccggaatttgagcgaatggttcgtatgggtgagatgttggaatatacatatgtgaatggtaatgcttacggaacaacaaagaaaagtgtagaggaagcgcgtgcaagagggaaaaatgtaattctggacgtggatacaatcggagcaatgaagattcgtgcactttgtccggatgctacactgatttacattttgccgccatcttgggatgaattaaagagccggctgtccagtactggaatttataccgaagaagaagtgaatgctttaatggaaatagcagaagaagagatttcatgtgccaataattatgattatattttggtcaatgatacaatttcaaatactttgagtcgtttcgcacagattattcatagtaatcgctatagccgtaactgtatgaaagaatttcttgatagttacatagacggagaagtgaagcctcatgttcagtcatacaaagaggcattactgtaaattttttgattattggaaatattctttgaaagatggcacctattttgcgaaagaagattcggatgaaaaacagaggagaacaggtgcctacagttacgaaagaattttcgcttgcgaatgaaagaatgatagatcagattttaaaagaaatacactattaaatcagatctgcttcttgaaaaaatgtgctagaattaagagatagataaatatttgatactagggtgagtaaggtagataaacagtggagagtcgtttcgtctaccttgcttttaaagaaaacttacagcgtatgctcacagacagtgagttcactgtaaaagtggagatgcgtaaaaattgatagaatatagtcattgattttatcgtactccttttaagcggacgatcattcgcactctgatccatctctaaattcaacaatatctgcgaatggtttccgaggtctcttggctggggcttcttgcatgatccttactgtattttccgcatctggtatggcaaatgcccattctggcataagtgtatgagtgactttttctgaatttataccctgacgcataatatcaaccaacttctctttttctttgccttgatatacaataaatttccaaggctgcctgtttttggcggatggtgcaagagtagcgctatatattatttcttcgagtaattttttactaatcttatcttctttatattttcttatacttcttctgttcccaatttcttgaatcataacttcctccaacaatctatattcgctttcggtattgtcgagctattactgattttactgcatttttcggactcagtctatataggaattggaacgaaaaatgacaagtcgaagaagtgatatattgctttgattgtgatgtgtatgatcgaaaactagaagatgagaagtttttatattcaaaagctattatattatgtttatctgattactgcgttgtatcatttgcacaaaaggagaaaacaaaaattatgcagaaagcctaaaaaatattttatacacataaaaatattgacaaaaacgataacagatgtataataatcacataaattggttgagccaatcaaccacaataccatcaaaccaataaaagaaaggaaagagaagatgtcaaaacaattagcagacaatcaagatttactggcaatgacacacgtaggagaagatccagaaaagtatatgaaatctgtaacgcctccgatttttatgaattcacttcatgtatttgatacggtaaaagattatttcgacgtagatatttttaaagatgaattctattatggaagagcatctaatccaactgttgcaattctcgaaaagaaaattgctgcactagagcacggttcaagagcagttgtattttcagcaggtatggcagcttgtgcagcggctattcttaagatttgtacagcaggaagtcatgtgatttgtattaaggaaagttatggaccagtacagcatttacttgatgagttccttagtccgaaatatgatgtagcagtcacttatgttgatggaagaactgtaaaggaattcgaagatgcaatccgtccagaaacgaaaatgattattttggagagtcccacaacgcttttatttaatgttgtagatttggaaggagtggcaaagcttgctaaagagcatggaattaaaacgtacattgataatacatactccactccgattttccaaaaaccgttggatatgggaattgatattgtaatgcataccatgacaaagtatatcggcggacatagtgatcttgtaggtggagtccttgtttcaaaggacgaagaatttatgcgtgagattatggttcaaagagattggtttggcggagttcttggaccaatggaagcctggctggcgattcgtggactacgtacattagacgttcgtatgcagagacattacgagacagcaatggaagtggctaaattccttgaaaagcagccaaagattaagcgtgtattctttacaggacttgaatcacatccacaatatgagcttgcaagaaaacagcagaaaggtgaatgtggactgatgagtcttgagattgacggaacattagaagagacagaaacctttgttaatagcttaaaactctttgagaaaggatgttcttggggaggatttgaaagccttgcaattgcttatacatataactggacggaagagcagtgtgcattcttaaatgtatcacgaaatattgtacgaattcactgtggtcttgaaggaacagaaaacctgattgctgatttgcagcaggcacttgataaaatttcataaaggagaaccatcatgggagaagagagaaaagaagtaaaaaaaccaaccctctttacagctgtattaccgttgatttttatgtttgttgttctttttacaggattggttgtttatagtattgatattaagattcttttgattatttgtgccgcatttacaatatgtgtgtgcatgtatcagggacataaatggaaagaaatcgaagatgaaatagtggctaaacttgcaaaagcatttccggcaatcatgattttgatttgtgttggacttatgattggtgcgtgggtagtaagtggaacaattccgtttcttgtatatataggacttcagattattagtccaaaatatattattattacttcatttcttgtaacagtaatactttctgtcagcacaggtacttcctggggagctgcaggaacagttggcgcagcactgatcagtgtggcagcaggtatgggtgcaccgcttccggcagttgcaggagcgattgttgcaggtgcttatttcggagataagatgtcaccattatcagacagtacaaatatgtctgcaattgcaacagaaacaaacttatatcagcatattggacatatgttttacacaacagttcctggatttattgtgagttgtgtagtttattttattgcaggagctcacttcgcaagtgactcacaggtggggcaggttgacgagattattaatacacttggagaactttttaatctcgcaatgccggtagggctgttattattgattccttgtgtgattgtaattgcaggatctcttatgaagaaacctacgattccggttatgattatttcttctgctgtagcaattgtacttgcaatgctagttcagggattttcatttacagattgtgcagcaagtatggttagcggatttaagatggagatgcttcacacatctatggatcttgaaaacattgtagaacaggttccgaatcttcttcagagaggtggtatgagttctatgatgaatacagcattaatggcattctgcggattctcttttatcggagcacttactgtatgtggaagtatggaactgattctggaacgaatcatgaaacatatccatggtacaggacagttgattacactcacagttattcttggtgtaattatgatcacagtaatcggagaagctacagtaacattccttatgattggtggaatgttccgtccagagtatattaaacgcggattggaatcaaagaacttgtcaagatcactggaagacagtattaccgtcgtagaacctttagtaccgtggtcattggctggtgtatatatgacctctgtacttggtgtaccgacagtacagtatgcaccatgggcagtactgtgctatacaggagttatttttgcaatcatctggggattcacaggatttggaattgcgaagattaaaaaaggatcagctgcatatgaagagtaccttgagttatctggaaaaacagagtaatatttgacaaaaaggacaatcttgacgttttcataagaattccttataattaaaagggttcggtatctgtaaaagatattggatccttttattaatgtagttatatagaaattggggaagttttatgaatcatataaataatacagaaaatgaaaatagaatttcaatgaaaccgatagaaaagaaatctctttatttgaaaatttcagatgctatttatcggtacattcaaatgaataatcttcagccaggggacaaactgccatcggaacgtgatatgtcttccatgctgcagacaagtcgaaattctgtgcgtgaagctttgagaatattagaagaccgtggattgatatatgtaaaaacaggaagtggtgtatttattaataatccttatggagaaaataattcgtttacaattcagcttactaattgctcattagaagaaattgaggaacttcagagtgcattggatcataaagccgtggagaatgcaatggagcgcggaacatttcaggagaaagatcaattagtatcaacagcagcggagatggtaaaattggctggagaaaatttatatagccatgtattagatcgaagctttcatgatagtctttataaaattggacggaatagcgcaatagaacagatgataaataaaattcgttcgtaccgattcatacagcaagaagattcagaagatggaaatgattctatttggcttgcaactattccgcaacatttgatgcttgctcaggctcttaaggatcgtgacatgaagatagcgatacaggcaatagatgagattaacgaatatggattcgaaatagcaaaaaagagagtcagtaattgatttgattaatagcatgtagtatagtgagagcaagaaatcaataataagacaatttgtttccggaataatacttttgacgatttctgtaataaaaaaagataaaaaattattttcagtatggaagagcggaaaaagaatctgctcttttctatttttttcacttacaggaatacttggtttacagttgaccaattttcttgccattgaatattcaaatgcagcaaccggaacaatcatataatttacatacattataatgattctggtttatacagctatcgtgttacataataaatcgaagtcatacgaaacagtagcagttctatgcgtgttttgcagtattttcctgatagcaacacatggacagctgaattctttggcagcgtaaaagcaagcctgttcgtgacagttgaaccggttacaagtgctgttcttacagggctatgctttaagacaaaatttgtactgccggatattatagaaagtagagggatgaatatgccaataggagttattatcaatgccctgtcggttgcagccggcggtgtgatcggggcattatttgggcacaagctgcctgcaaaaattaattcggaacttaccaagatatttggtgtctgctcaatgggaatgggagttagttccattggacttatgaaaaatatgcctgctgttatttttgcagtgataattggaactgcctttggtctggcagtcaatctgggcggaattattaatggcggagcgacctgcatggagaaaccagtgggaaaactcttcccaaataagaacaaatccatgtccagagaagagtatatgtcaatgcttgtgacgatcatcgtattgttttgtgccagtgggacagggatttatggttcactggattccggaatgagcggtgatcatacaattttgatttcgaagtcgattctggatttctttactgcgatgatttttggaggaacattaggtatggtggttgctgcagttgcaattccgcagtgtgtgatcttccttattatattcgcagcagcaaaatttattttcccactgaccacgccggatatgattgccgacttcaaggcatgtggaggcttcctgcttcttgcaactggtttccggatcgcaaagattcacgattttccagtcgcagacatgatcccagccatggtgcttgtgatgccggtgagctggttctgggtaaatatgatcgtaccgatgctgtaaagcagaagaaatgtatcattctatatttcagcatgttccaatatataattcttaaaattcgtaacaacaggtgcctgataaacattcttcaaagttgccatgtagaagagtctttcccaggacggagttgcaatctctatgattgaaaccggtaaagaggaaagaatcggcattcgcggcacaactgcgatgccgaatccggcactgactaatccggcaacaccctgatcttcttccattgagtaagcaatctgagggtatccgccacatttttcaaataacttgtcaattacatgtcttaaaccgcttcgcttagagaaaacgatgtgcggatacgtaagcgcttcttttagatcaatcgaagttttcccgtccaaaggatgtccttccggtacgatcagtacaagctcttgttttgcgaccggaacaaactcaacgagcggttcattgtccatcttggaacaaaatgcgatgtcgtattttcgctcttttaatccctggatcatgtcggatgtgagtccggtcgaactgtgaaaataaaaatcgatttttttgttaggcgtggaatccaaaaaaccttttacaaagttcggaacaactgcactgctgagcgtacggagttcaacaatatcgatgcggccttctccaaatccggtcatctgcagtttattgatgcttgaatccagcatatccaaagcctgttccacatcggcaagaaaagcctgtccacattttgtgaggacaacgttacgtccatctttttcaaagagttttactccgagctcactttccagagatgagattgcatgacttaagcttggttgagtgatagaaagaatctccgcagcctttgtgtagtgttctagatgagcgagagtaacaaaatatctaagatgatagagattcataaagtctggtaccttccttataaaaatttgtatcttcccatttaatcaggttcattttatatctatttggtaactgttcagagccaagcaaaatttcataaaacagatgtaaaatgcttgcatttttaagactgtttttgaaattttatttggcggatacgccacaccgacgaaatgcgtagcattttggaggttggctctgaacagttactctatttgagagataaatacgcaataatgcttattgataataatatcgtaacacgaagtgtaaataaaatctataaacaaaatgcatggatcgtgatagaattaccaatttgtcatttatttaacaaacagatataataaaaatagaaaaaaacaacaagattgaacagaaaaatccaatggattatattcaatttttacaatggaggaagaattatgtcaaagaaaaacccaatcacagtaagttcatggacacttggagatcagtgcaaatttgaagatcgtgtaatcgctgcaaaggaagcaggatatgaaggaatcggtcttcgcgcagagacttatgttgatgcattgaatgaaggacttcataatgaagacattcttgcaattcttgacaaacatgatatgaaagtaacagaggtagagtacattgttcagtggtgtgaggaacatcgttcttatgagcagaaatacaaagagcagatgtgtttccatatgtgcgaactctttggagtaggccacatcaactgtggactgatggaaaattattctgttgagtacacagcacagaaattaaaagaactttgccagagagcaggaaaatacatcattggtgttgagccgatgccatacagcggaattccggatcttaagaaaggctgggaagttgtaaaagcttctggatgcgacaacgcaatgctcattcttgatacatggcactgggtaagagcagatcagccatacgatatccttacaccggagattgccaagaaagttatttctatccagattaatgatgcttatgaaagaccatatgcagaacctattttaagagatgagtctatgcatgatcgtcttgcaccgggaacaggagcaaaagatacagcaggatttgttaagatgattaaagacgcaggagttgatccgaaggttgttggtgtagaagttatttctgatgcaatccttggaaaaggactgaaagaagcagctgcttatacatatgaaaacacagagaaagtattaaaagaagtttggccagagttggtagactaatttgaaaaacagatgatgccaaagagagaggtaaaatgatgaaattcaaaaatatgttttctccgattcagattggacctatgactgttaaaaatcgttttgtggttccaccgatgggaaataatttcgcaaattcagacggaacatggagtgacgaatctgtggcttactatggtgagcgtgcaaaaggtcagtttggtctgatcacaattgaagcgactgtagtacataaaggagcgaagggcggtcctaagaaaccatgtctttatgatgacaacagcattgaaagtctgaagaaaatcacagatgcatgtcatgcagaaggtgcaaaggtatctatccagcttcagaatgcaggaccggaaggaaatgcaaagaatgcaggagcaccgatccaggcagctacagcaatcgcatcagcagatggaagagacattcctgaagaagtatctacagaaaaagtgtatgagcttgtaaaaggatatggtgaagcagcagaacgtgcaatgaaaggtggatcagatgcagtagagatccatatggcgcacggctatcttgtaaattcatttatgtcaccaagaacaaataagcgtgtcgatgagtttggcggaaactttgagaacagaatgagattttcacgtctcatcattgaagaagtaaagaagaaaacagaaggaaagattgctgttcttgcacgtattaacagtacagaagacatgtttggcggacttgataatcacgatatgtgtgcagttgcttcttatttagaagattgcgggattgatggtcttcacgtatcccgtgcagtacatttaaaagatgagtatatgtgggctccgacaggaattcacggcggattctcagcagagcttgttgcaaatatcaagaaatgtgtttctattccggttattacagtcggaagatatacagaaccacagtttgcagaacagatcatcaaaatgggaaatgcagatttagtagcatttggacgtcagtcacttgcagatccgcacacaccacagaaagcaatggaagaaagactggaagatcttacaccatgtatcgcctgtcttcagggctgtgttgccaatatgtatgcaggtaaaccaatctgttgtcttgtgaatccggtacttggacatgaaaaagaaggacttccgaaggctgagaaggtgaaaaaagtttacgtgatcggtggtggtgtggcaggtatgtgtgctgcatttacagcgaagagacgcggacatgatgtaacattatttgaagctacagataagcttggcggtaatatgagactggctgcatatccaccaggaaaaggtgatatcacaggtatgatcagaagttacattgtaaaatgtgaaaaagccggagttaatatcaagatgaatacaaaagtaactgcacagatgttgaaagaagatacaccggatgcagtgatccttgcaacaggagctgagactttagtacttccatttatcaaaggtattgaaaatccggatatcgtctatggtgttgactgcctggaaggaacacgcccggtaggacataaagtcttagttgttggtggcggtatggtaggtgcagagacagcagacttcttagcagaacagggacatgaagtagccattatcgaaatgagagacgcgatcggaccggatgtgatccatgagcacagaatttttcttatggaagcatttgagaaatatggtatcaaacagattacaagtgcagctgtatcagagatcttctcagatggcgtaagttataaaaatgcagcagataaatcagacgagacgatctacgaggcaagaggatttgacacagttgttctctctatgggattcagctcacgttatacacaccgtgatggacagaacgtagtttatgactttgcagaagaattaaaagacatcgtaccagaagtccacatggtaggtgacgcagtaagagcacgccgtgcactggatgccacaaaagaagcatatgaggttgcattgaatttataaatgaaattatatcaggaggattagaatcatggaaaaaagaatttctggacacacaggcttaatgggattatttggatcaccggttggacattcaggatcaccggcaatgtacaacttcagtttccagcatgacggattagattatgcatatctggcatttgatgtaacagaggaagaaatgccaaaagcatttgaggcaattcgtttattcaacatgcgcgctggtaactttacaatgccatgtaaaaatattgcagcaaagttagttgacaaactttctccggcagcagagatcatcggagcatgtaacgcatttgtaaatgataacagtgtgatcacaggatacattacagatggtgttggatttgttaaaaatcttgagatcaacggtgtatctgtaaaagataaaaagattgttgtccttggtgccggtggagccgctacagctattcaggttcagttagcattggacggagcaaaagaagttaacattttcaatataaaagataaattctacgaaagagcagaaggaacaaaggctaaattagcagagaagtgtccggactgtgttgttactgtagaggatcttgctgataaggctaaactggaagaagagatcaaaacttgtgatattcttatcaatacaacgattatgggaatgaaaccacacgaggatgtaactctggttgacaaatctttattccgtaaggatcttgttgttgcagatactgtatacaatccagagaagacaaagatgattcttgaagcagaagaagcaggatgcaaagcaatcggtggcgcaggaatgcttctgcagcagggggcagttaactacgaactgtttgttggaaaagagatgccacttgctgagtatcaggaatttcagaaggctcaggcaaaataattacattcacaaaaggagaatgatggaatgagagcaaagaaatatttgtggtctatcctttgtgtatatttttgctatttaacacatggtatccaggctatcattttaagtcagaacaacgtaaactttgcaaaacagtggggattcaatatgacagacccacagtcagcagcatatgcagcaggtcttgcagcggtaagtacagcagttgcatggacaggctttggtaaattcgtcagcgtctggatcggtggagagatttcggatcatgtaggacgtaaaaaattaatgatcggtggagcagcattatatattctatgcttccttggattcttatttacaaaaagtgcattagttgcttctgtatgtggatttgtttcaggagttgcaacatccggtttctgggatgcatcaggatatccggctgtacaggaagcttatccggcagcacctggatctgcactgatcgggatcaaattttttgtttctgtttccggtatgatttatccattcatggttgttcataatgcaaacagcggaaactggaaattaaatgttattatcccgcttgtaatgtcagttgtttgtctggtacttgcaattattgcaccgtttgcttatgatgatcagaagaaagcgtcagaaggaaagaaagacaaatccgataatgcagtgcaggcagcaatgcttgtaaagccaaataaatttatcgtatttcttgtaatgttttatgcgttcctttgcatggcgatcatgtatggcgcacagcagtatacaaaagcatttggactttccgtatgtggactttccgagattcaggcagcaggtatgacttctatttatacaatcgggtctatctgtgcagtacttttctgggcgttttatgatggcaaaattaaaatggaacccgctaaaggttgtccttattgattctatctgtacagcagtggcacttacaggtgtactgtttatccatcaggtagcaatcatttacatcgcgatcgcaatgttgggattcttcgcagcaggaggtgctcttcagacaggtcttgcagttgttcagttatttaacccaggaccgaagggaagaaatactggtatttattacacatttatgggtgcggcaagctacctgatcccagtagtggcagcacagcttacaaaatcatctggtgaggcaagtgcagtatacagcctcatgatcatgctgttagtatttgcaatccttgctattttaagttctctctacttagtagcacagcataaaaaaatcttcggaaaaagtgcattataggaagtaacatagtaacaatctcaattcatacgaaaaaaatggactgttgttccaaaagatgttatcatcaaaaagaatgcagtcctttttttgagattaaattgttaaaaaatagacacttgtaaatcgaaaaatgaaggagaagcttaaaagatgagtccgaaaagaacaagaaaagccaacgaacttccctatattccactcggcccatttcagtggcgtattccgggaattcattataaattagaatatgtagaattttttcaaggtctgatccttggcgctacagcgttaagttcgattccgtatctgacggataatcttggacttccgtatgaacttgcatggagctgcgtcatcattgaagtatttatgtacatgcttcatggatggttaggagatcccgttgtcccgggatggatcacaccgacattaccatttacactggcatatttaaatggattcccaaaaggaccggagcgtattcaggcaatgattgcattgcagctgcttgttgcatttgtatttatatttatgggaattaccaagcttgcagataaattcgtgaatggtgtgccgaattcaatcaaaggcggtattctgattgcagcaccgattacagtattgcaaggacagctctcagatggaagtcagctgatgactgcgccaatcgcaacactttccggtacattgttacttgcgtttttgagtttttcaccgttctgtgaaaagaacagagaaaaatacaaaatattggatatcatggcaaaatatggaaatttattcccatatctgattgccatgttagtaggagtattgcttggagaattgtcaaaaccggttctcgaacttggaacactcatccgaattcctgactttagtaatattttccacacagtcagtatttttgcagtcggatttccaccgatttcaaaatttataagtgcaattccgttggcgttgatctgttatgtacttgcgtttggagattttgttacatcacagacgttggtagaggaagcacaggacagtagaagtgacgaatatattgactttaattcaagcagatcaaacctgatcagtggtcttagaaacctgatccttgcaatttttgcaccgttcccaccactggcaggtccgctttggatcggtatgaccgtatctgttgcaatgcgttataaagaaggaaagaaagcgatgaaatcgctgatcggtggaatgagttctttccgtatggcaacattcatcagtgttattttagtgccgatcgtgtcattcatgaaaccaatcatgggcgtgggttctgcaatcactttgttattccaggcatatgtatgtgcaagaatcggtatggactattgtaagacgagtacagataaaagtattgccggagtaatggcagcagtgcttgcattcaaaggttccggatgggctttgcttgtaggttttgcaatgaacatcttactgtctaatatggaatttcagaagaagaaattagagatttcagagacagaacaaaattaataaaagaattcaacaggagcagttagtctggaaaatagactagctgctttttgtgtaaaaagcagctaatctaatttttatattgtgaaaaatcaagccagtcccagttgatccaattttattttacaaaattaaatctgcaaatcctgtagatacaaggaataagatgagcattacaacaggaactacataacggatcataaagcgatacatgccggcacgtttaaaatgttctccgttcctttctacttctcctatgatccagtcaggtccgattacccagccaatcagaatactggtcagaagtgagatgaatggcataaggaagctgttgctgatatagtccataacatccagcagctgtccaacagatccatttggaagtttcagttcgaaataaagtttattatatccaagacagatcaatactgcagtaataagggaataaatcccaactgcaccacacatttttttacgtggcttatgatataattccatacagtttgcaaccagagtttccataacggaaacgcaggaggtaagtgccgcaaatcccatcatcaggaagaaggcaattgctgccggacgtccaaagattcccatggcgtcaaaaacttttggcagtgagatgaagatcaggcttggacctgaggccattccatcatttccaagaaatacaaagacagcagggatgatcatcattccggcaaggaatgcaactcccgtgtcaaagagttcaatctgattcgttgctttattcaaatcaacatcatttttaacataagaaccgtaagtgatcataattcccatagatacgcttaaggaaaagaataactgactcatcgcatccagaagaatttccagaaaacgttttacggttaatccgtgaaagtctggttttaaataaacagacagaccttgcatacctgtacgaacagtaccatctgccgctgtgtgagacagtgtcagacagaaaatggaaatgatcacgattaaaagaatcaatccaggcataatgatcttggaaaatttttcaattcccttttctacaccgcgaaatacgatccaggcagtcagcgcaaggaaaatcaacataaatacaattggtgcaatatcagatgtgataaaagatgtaaaatatccatctgctgctgcttcagttccgtcagaaacaagatagacgaaaaggtattttgaaatccatccaccgatgacagaataataagtcatgatcaataccggaacgaggaaagttaaacgtcccagaaatttccattttggattaagctcttcaaaagctctcagtgcatttttctttgtttttcgtccgatcgcaacatctgttgtcagtaatacaaacccaaaagttaataccagtaccaggtataccagaaggaacagaccgcctccgtcctttgcacataagtacggaaacctccagatatttccaacacctacggcgcttccggctgcggctaagacaaagcctattgaaccggaaaagctgcttcctttttctttcatttcaaattcccctctcaataaagttaataaaaggctgtagaagttcagcccaatagctatattttatacgaaataaatataaaatcaagtgaaagaagtttcctttaaagaaactttatggaagaaaagtttcgtaaaactttacaaatcaactgcttttcagatataattataaaagaaagaaattaatgaaaagaatggatagtatgaggaaacaaaatgagtgattttacttgttatgtaggggaacaaatacgacaataccggaaagccgggaagatgacaatgcaggaactggcagatgccatccacaagagcagagctacgatatgtaaatatgaaagtggagaaatttcggttgatattgaaacattatatgagatcagccaggtgcttcaggtgtcgatctctcagcttaccacataccttccggaatcggtcaatgaaccggtcagttttccgggatgggggaaaaagagcccattctttcaggcgaggagattatatttatatttttatgacggacgctatcagagaacaaaagatggtgttatcgatatttatgaaaagaagggagaacctggaaagtacgaggcaactctgacaatctgttctgtttctgcaaatggaagaagcagtgagattttttatatcggaagagtactttacagcgatatgttgattcgtttttcttttgtaaatcaatataatccgttggaagaggatcttctttatatttttaatcctctggaactcagagattttacaatggggcttttatgtggaatttcaagcgcagatcttatgccttgtgcttttaaatgtgtaatcacgttaaaaccacaggaacacacggaaagtttccgtcaccagttgctttttactaaaaaagatctgaagcgtctggagcagcttaacatgttgctggtagataatatgaagaaataagggagacatcagtgaaacgaaacaaaagacaattgtatgtaatgatttttgtttttgcaatgattgcgctggcctatacttgccgtatgctggatatgtatgatataggcaacggttatccgggggatgtccgcgcggcgctatatatagttttacttgctttgtggggatattctattgaccggaggatcattcagaagccggtactgcactgtctgcgcctgacagatgcactgatgttgctttggcttattcttcggacacttaagtatgaagtgatcacggatctgacagtggcgaggtatctatggtatttgtattacttgccaatgctgtttatcccgttgctgggggtatatattgcaatgtctttgggaaagtcagaggaatatcgtctgagtggaaagacacaactgttgacaattattcctgcactacttttcttatgtgttattaccaatgatcttcatcaaaaagtgtttacatttaaaagcggaattccgggaaatccaggtaatggaccatattatcacaatgtggtgtattttttctgccttgcctggatggtgggctgcatgatatttacagttgttcatatatttaagaatagtcgtgtttcaaatgtaggaaaaagacgggtgatgccatttgtattttgttgtgtgacaattctgtatggagtgctttatctgatcggaatcccacaggtacgttatgtgtttggggatatgaatgtgatgaactgtctgatgtatatggccatttacgaaagctgcattcactgcaagatgatacagtcgaattctggttatattgaactgtttgaggcaacaacgctggcaggctgcattgcagatgaaaatgggcagattgttcttcgctcccatgcggcaggagaagatatgatctgtcccagggagggacagaaaatacttacgcctgatggaatgcgcatctcatcggcaccgatcagaggaggctttgttgtctggagtgataatgtacgtccattgatggatcttcgaacccggctgaatgaaaataaattggagatggagaagaataaaaagaaactccaggatgcctatcttgtacagaagaggctgtatgagctgacggaaaagaatcatatttacgatgaactggaagtgaagtttaaaaaacagacagatcagatacgtcagctgctcgaacaatgtaagaacgctgatccatgtgagacacggaaattcttgaaagagatattgctgatcggtacatacattaagcgcagtgcaaacctgtattttttaagcgaagaatatgaaatactgccgcagcaggaattacgactgacagttgatgaagcagtacgggcaatgaccgcctgtggtacagaatgtggagtgctctatcgtacaacaagaccgatgcgttcagcagatgttgtgcgcttatttgaattgctgcatgttgtggcagagaagacactgggagaattacagtcattgtttatctctgtgtctgatgatgaaatgaatttatctgtggaatgtagtacagatctgtcagtgatagcttcacaggaagtgacagtctgtcaggatgatggattgtggatggtccgtacacagataggaggacaggacaatgcatagattgaaacatttcgggttcaatgtaatcaaggaaagctttgatcagcttccttccggagtctgtttttttaattacaagggagacattgtactttgcaaccgacagatgtatcgtttgagccagtatttatttgacagtgatatgcaacatctcagggaagttgagcaggcacttcgctttccaccggagggagttgtactgcttccggggctggagagtacttatcggtttccggataaaagtgtctggagatttgaaaagacagaagttacagatcgttatggagagacttatacacagcttacagccgctgatattacagaaatacatcgagtattggtacagattgctgctgataatcaaaaacttaacgaggatgaaaaaaagctgttggagctttctgaaaatgttaaggcaattgtcagagaaaaggagcagcttgcggcgaagtctgccatgcatgatggtcttgctgcaagtcttaccgtaacgaagcagtatcttgcaggaaatcttggagagattgatatagcagttgtacttcatgaatgggagaaaagcattgctttccgtgatgctgttcttttatccgaaaaagagaagttattcgataatgccagcagcagcggagtttccattcagataaagggggaagaaccaacagggagtgcggcagaattaacgtatgtggcgatgcaggtttgtctgaataatgcaatccaatatgcgaaggcaacaaaattgtcggtaagtattcaggaaaatgaagataaatattcagtggtgatccgtaataatgggaagcctccggagaaggtgattacagaggggggaggtcttacaaatctgcgtcgccgaattgaaaagtcaggtggtataatgacggtatatagtctgccggagttttctttggtgatggatctgccaaagacagataatgcagaggaaggggggaagggatagcagtgaaaaaaatattaattgttgaggatcaggcgcttgcgcgcatgtatctttgcacatgcgttgaaaaatgtatagattgcgaagtggcaggtacgttgacccgggctgatgctgcactcagccggtgtggagaaggacatatagacctgattctgatggatatttgtaccgagagtgattctgacggtctgacagcggctgaatcggtcaaaaaattctatccccggattaagattgtgatggtcacttcaatgcttgaaggacgtttcctggatcgtgcaagaaagattggtgcagatagtttctggtataaggactccccatccggagatctcattgatgtgatcgaaggaaccctttcaggaaaacatttctggccggacagtgtaccggcagtacaactcggaaaggcactctcctgtgatctgtcagaccaggagcttgagactttgcgtctgctatgcgaagggaagacaaacagtgagatcgcagcaaaacttcatgtggcagaatcttccgttagaacttatatcaaccgcatgttagagaagacgggatattcaaatcgtaatcgtctgatggtagcagcagtcggtaagcgtctggttgtaccgggaaatcaacttgatgattgaaagaaaaaaatctatttgtcctcactttcgaggacagacggattttttcttttttgttataataaaataaaagaaaagaacacatcggatatgtcgcaaaaggaaagggggatggtttgatgcggaaaattgtggtcgatatgcagaattttctgtttgctgattccatagcgaccgcattcagaaattcagattatgagatcgatgtgattcgtgcggagtctccgaaggatacggttgaattgtgtcaggtgtacaaaccatttgttcttataatggaagtgacaggttatatcccgtggaacctctgtgagagattgaagcttcgtgatgaagtaaagaaaatgtgtccccactgtaaaattgctctcattgtagattccaatacggaacgacaggcagcgatagagattcgggatgcaaagaagaatggttttattgatcagtttttctatggatctatgacagctgaatatctgatggatcagatttatgcgatgtaaaaaggcagcaggaaacaaaccgtgatttgtctgtagaattttaaaatgtagacagatcataagttgaaaaaggaggagtcagtatgggacttattaaagcaggtatgggtgcacttggtggaacattagcggatcaatggaaggagtttttctattgcgaatctatgccgaaagaagtgcttgttacaaagggtcagaagagaacgacaggtcgttcttctaatacaaaaggaaatgacaatatcatttctaacggttccggtattgccgtggctgatggacagtgtatgatcattgtagaacagggtaaggttgtagaagtttgtgcagagcctggtgaatttacatatgatacctcaacagaaccatctattttctcaggtaatctcggtgagagcattaaagagacatttaaaaccgtaggcaagcgttttacttatggtggagatacaggtaaggatcagagaatttattactttaatacaaaagaaattctggaaaaccgtttcggtacagcgaatccggttccgttccgtgtagtagactccaagatcggattggatattgacgtatcaatccgttgttcaggtgtatattcttacaagattgttgatccactgttgttctactcaaatgtatgtggaaatgtagaacaggagtattcccgtgaagaacttgacagtactcttaagacagaatttatctcagccctgcagccggcatttggtcgtctgtcagagatggaacttcgtccaaaccagattgtaacacacaacacagatcttgaaaatgccatgaatactgcactttcagagaagtggggcgctcttcgtggactgaaggttgtaagtattgctcttggatcagttactcttccggacgaggatgcagaactgatcaaacaggcacagcgtacagcaatcatgcgtgatcctacaatggcagcagctacaattgtcggtgctcaggcagatgcgatgaagaccgcagcaggcaacgaggctggagctatgacaggattcatgggcatgggtatggcaatgaacgctgcaggtggtggaatgaatgcacagaatcttttcgctatgggacagcaacagcaggctcagcaggcagcacagcagcaggcagctccgacaccacagccggcaccggtaccgcaggcagctccggcagcaggcggatggaaatgtgcatgtggtactacagtaacaggtaatttctgtccaaactgtggagcaaagaaaccggaaccgaaaccagaaccgggcgcatggaaatgctcttgcggagctacggtgacaggcaacttctgtccggaatgcggttctaagagaccagcagaggacgaaggctggacgtgttcctgtggcgcagtaaacaaaggcaaattctgtacgaactgtggagcaaagaagccggcaggagcgccgctttaccgttgtgataagtgcggatgggaaccggaagatccgaagaatccgccgagattctgtccggagtgtggagatatctttgacgagaacgacagacagtaacggatgaatagcagttagaaaataactgccggaagcacggcacggaagaaaggagaatgagttatggcaggcttgcaggaatataaatgtccttgctgtggcggtgcaatcgcctttgacagtaagattcagaagatgaagtgtccgtactgtgatactgagttcgagatggatgcactcaaaggttatgatgcagagctgcagaatgaacagacagatgacatggagtgggatacttccgcaggcagtgaatggcaggaaggtgaaacagatggtttacgcacgtatgtgtgtaagtcctgtggaggcgagattgtcggagatgccaacatggcagcaacatcctgcccattctgtgataatccgatcgtaatgatgggacaatttgcgggagcattaaaaccggatctggtgatcccgttcaaattagataaaaaggcagcaaaagaaggattgaagaagcatctgacaggaaaacgtcttctgccaaagatcttcaaggatcagaatcatattgatgagatcaaaggtatttacgttccattctggctttttgatacaaatgtagatgctgcagtccgctatcgggcaacaaaggtacgcatgtggagtgacagtgattatgattatactgagacaagtcattttatggttcaccggggtggaagtattggttttgaaaatgttccggtagatggctccacaaagatggcagatgatctgatggaatctatcgaaccattcaatatttcaggtgcggtggatttccagactgcttatctcgcaggatatctggcagataagtatgacgtaactgctgaacaaagtattgaacgtgctaataaacgtgtaaaacattctacagaggaagcttttgctgagacagtaaaaggttatgctacagtaacaacagacaatagcagtgtacaatttcatggcggaaaagcaaagtatgcactgtatccggtatggcttctgaatacgacatggaacggaaataaatacacctttgcaatgaatggacagacaggaaagtttgtcggtgatctgccggtagataaaggtgcagcagcacgctggacagtgatgctggcagctgtattctcagttgtaacgtatggtgctgcatggcttttgcacctgatcggactgttttagggaggtggggaaatgaagaaaagaattttatcgtttatgacgatcctcatcctctgtctaggtcttgcagttccggcttttgcggaggaaacagaaggatttgcgaatgaatatcctcgtgtcatcgacaatgcggagctcctgtctgcagatgagagggagctgttaaccagtaagttagatgagatcagtacgcgacagaaggtagatgtgacggttgccacaaccgatacactggatggactgacggtatctgattatgcggaacgattctacgagtctcataattatggttatggaccggacaaggatggaacaatacttctgatcagtatggaagatcatgattggtatatggcaacctacggatatgctattacagcatttacggatgcaggtatccagtacataggagaagagatgacgggtgatttgtctgatggtgattttgcggcagcatttgatacatttgctgacgagtgtgatgattttattacgcaggcaaaaaccggagaaccttatgatatcgataatgaaccacaaaaaccaatgtcatggatctggattccgatttcattagtagctggtatcgtcctttcattgattgttgttggcactatgaaatcaaagttgaaaacagtacgtttccaggcagcagctaataattatgtgaaagctggaagtatgaatcttactgagagcagagacatattcctgtataatacaatgacaaaaacaaaaaaagagaaaaatgattcttccagtggtggcggcggaagcagtacgcatacaacatcttccggaagcactgccggaggcggtggcggaaaattctaggagagatgtccggatacagaataccggggcaatttaatagtgaaaaaagagaagctatttcccaaatgattgggaattggcttctcttttttaatgatgtaattatcttttcacatccacaaaatatttcctgaactcatcataagaacacggccgtccccagtagaatccctggcagtaatccggcctgttttaattttttcaggaagttttgcgccttttcatttttttcgagcagaatactttctgtcagttcaattacaattgcagcaggtggaagaccagaagcgtccatctcgctgataaggtctgtaataatatctgattttgtgatctgcacctgggatacattaatattaactttgaaatcaggaatttgcatccggattttccggcaggcggttattgcttctcgcatgaaccagcgtccggttggaataatcagtccgcttgtctctaaaagtggtatgaactcagcaggtgagatcggtccaaattttttagaagcaaagcgtatcagcacctctgctccggtcagtttatcctgtcggatatccatgactggctggaagattattgagaatccacggaaatcatgatttactgctgaatgaagctcatttgtgatctcacggatacgtaagaaattctggtactggaatatataacagcagtttcttccatgctgcttagccacggtcagtgaaaagtcagttcgctttataatctcttcataaccggtccgtgatagatccggaagcggcaggataccggcagaaatagtaaataccgcagcaaagttgttttcttcaataaactgattaatatgtttgcatatgcaagtttccgttttcgttttatgcggtacagcatgagatcacttcgttctgaaaagacagtgccaaacaggatgaacaggattaaagaaatccataatttttcttaaatttcatgactttttccttttatagaatatcacttccatccgggatcttggaaataatcgttcgattagtcctgaacagaaagataagtgagacaatcagtgacatgatctcagcagtcaggaaagcccaccatactgcatgaagcccaccaaattttgccagtacatatgcagccggaatcagtactacaagctgacgcatgatggataacgatcatactgaacacggcctttccaagcgcctggaatacagtaccacagatgatgccaaaccatgcaagtaagtaatggataccgatgatacgaagcgcagggacgccgattgtaagcatatcagcagatgcgttgaacattccaagaagtacctgtggaactaattcaaagcaaaggaatccgaagagcataatgcaaaatgctgttgccatactgagtttgatcgtcttgaccatacgttttctgttctgcgcaccgtagttgaatgcaatgatcggagtgataccgttattcaaaccgaagacaggcatgaagaaaaagctctgcagtttgaaatacactccgaatacggcggtcgcagtagatgaaaatgtgatcaggatacggttcatggagtatgtcataacagaaccaatcgactgcatgataatagatggaataccgattgcataaattgttctgataattcttccgtccggacgaaaaccatggaactgaagccttacatccgggttgaatttatgattacatgtaaatgaaacaagtgctccgacacactgtccgatgaccgtagccacggcagcacctgtaacccccatcttcgggaaaccgatcagaccaaagatcaggatcgggtcaagaatgatattcgtaaccgcaccgcataactgagaagtcatactgaaaatggttcttcctgtggaagtgagcagtcgttcaaagcaaatctgtgccagcagtcccatagagaagatcataacagtgctcagataatcaattcccatttccatgatctcaacatctgcatttccaatctggcttgcatagaaaggttttacaactgtaaagccaaggataagaaatacaatataacttatgatataaagaaatgttccgttagacgcaatcttatttgcttcgtcagttttttttgctccgagtgctctggaaagaagtgcattcataccaacgccggtaccggttgcaactgcaacgagcagcatctgtaacgggaaggcaagagagactgcggtaagagcattttctgacagttttgctacaaagatactgtctacaatattataaagtgcctgcactagcatagaaaccatcatcggtaaggacatattgaacaagagtctgccgatcggcatggttcccattttgttttctgctgcaggggcagaagctgttttttgattcatatattctcctgttattactaaaaattcatttaaattgccaattattaataatagcattatacggtgtacgtttcaatagttgaagacttgaaaatgtcttaaaggtcagtttggcattcttgaattattgtgttaataggtaaagtcagtagaagtaatagtaacaacttgacagtttgcgtactgtatgatattttctaagtagtaagtagtaagtagtaagtaaaatacaaaaatggtgatcaggaaataagaggttactgttcactcccgtgtcaatcactccgctgattgacacggaggatgcgcgttttgacttgaatgcatctcgccccatcgccaaaggcgatttaaaatggcgagatgcgttgctggtcgcacatcgtgtgaacagtaacaataagaggaaagagaggaagacaggtatgaaagatcttacattatctcagcaatatgcattacttgcgttggacggacaggagagtattcatccaagcgtggcaaaaagtgctgtattgagagctgtttcggctgcgcaggtgttggagacagaattaggaaaagcagatgtggattcattttcagaattttcttcagcactgcagaaagcggtacagacggcaaagacgttgaagaaaaaagaggagactcagatcgagcaaaaagtggttaatattctggaagcagaagaattacttaaggaagtaccggatattttgggctgtgatatgaattatgatacatcaggtgttgaactaaaggcataccttagtgatgagacaagttatatcagaataaaagaaggacttcgtgcagagattctagaggatggtccaattagtctggaagatgcggttctcttatggcttctccgtgaaagtggctgtatccatgacttattttctgtatcagagcagaaccgtgtagaagagcgtatgacagaagttgccgttcaggatgagaagtaccgtgcattatgggaagcagaatttcataatgtttttgaaggatttatgaatcggtttgtgaagactaagagcaaactgcttaagaatccatatttagagggtgttaatcttgtattcccgtatcttgacagaagaaaatctgtatttattgatatggttatttttggaactaatgtggcagacagaagagctgcggctgtagaatatctgaagaaaaaaggctttgcggtagaggagatcagagtaggcagtgagactttactaaaaataggcaatatatattaccgtatcttcccaatgacgaaaacagcatataaagtaccgattcagggagtcaacctggtaccggcatactggcagtaggaagaaagtactgaaatactaattatgtagacagtagaaaaggtgagcagatgtcaagacagagaagcatggaagtaatagagcaggcagaatatgtgacaatcggagagcttgtgcggcttacggcagtgcgttacagtactttgaaattttatacagaggaaggaatgctgccgttcgagcaggcagaagagaatctgaccagaagataccgcagagttgagagcttagaaaggattgtgcagattcgtcggttaagagaacaaaagaagacgattccggagattaaagagattctgggatgtggtgaactgtaaaatatgaatattatctagaaaaaatacgaatctccagaagaagttcaagtataaaaatactgatttctactggagattcgtattttaagaatatgtgttaatattggaaaattatgcatccagtatgctttctgcaacttctggaagaatttcactgactgctccatggtaagctgcggttgctttttcatccagataatgtgcttccttgtggattacgatcaaatctttgcctgtgaaatgtggaagcatatctttgcacagactggaattcaggttcatcccgagaacgagaatcgtatcagctttagcaacttcttccacagcatggctaatgacagtattactgagcatttcaccatgtaaataaactccaggatgaatcacagtcgatttacacacatcacaaagaggaactttatcactgtttttgatatattcaatcgggaaaatctttccgcaacgtggacacgcattattttcataaatatttccatatatattgatcacatttttacagccggctttctgaggcatattatagatgccttttgtaatgattgtctttaaatatcctgcctcttctaatcttgcaagtgcttcatttccctttcctgcctccagatgtttggaaagaatttcatttctataatattcatagaataattctgcatgtgtgttaaacatacgggcactgaataattcttccggagagtagccatacttttcttcaatccgataggattcgtcgctgtctcgatgatatgcgacattttgctctctcataaattccattccggcgagacaaacaagatatttagatgttctaattgtttcttcaagatagtttaaattcataatcatccctgcctttacaaaatgctgctgttaacgagttactataatgctagtatagcataaataaaaagaattgtctgaaaattcaaataaaaacaggataaaatttaaagaaaaactggacaaaataaaatttacagttgacaatagcgggagaataggctatattaagaatataataatagtaattattattaaaataaaaaggaggttatcacatggagaaaaaagcactttataatttgtcttatggagtatttatgttatctacacgttccggtgagaaagtaaatggctgtattaccaatacatgtatgcaggtagcgaatgacccagttcgaattgcgatctctgttttgaacagtaattatacctgtgatctgatcaaagaaagcggaatttttgcactgagtctgttggatgtagaatgttcctttgagacaattaagcatttcggattccagtcaggaagagatgtggataagatgaaagatcttacgttaccggtagatcagaataatattccatatatgggatatcaggcatgcgccgtgatcagtggtaaggttctggaacagcaggatctcggtacacacactctgttcattgcagaagtaacagatgcaaaactgctgaatgagaatgcaccgcttacttacgccgactatcagaatcgcgtaaaaccaaagaagaaagagatacctcaggataagaagatcgttggatggagatgtaagatctgtaattatgtatatgaaggcagtgaacttccggcagattatatctgtccaatctgcggacatgatgtcagcgattttgaaccgatttttgaaaattagtggtaatgattcattgatcttgttgtgtagtgaatggatgcaaggtcaggaataattataaaaataaagatgaaaagaaaaggagatatggaattatgaaatatgtatgtgatttatgtggatgggaatatgatgaagagcagggatacccggaaggcggtatcgcacctggaacaaagtgggaagatgtaccggaagattttgaatgtccgctgtgttctgctggaaaggatcagttctctgaggagtaaatagaacagttacgaaaatttattttaaataatgaaaacaggtggtagaatagacagagaactattttatcacctgttttacgttacgaaagagaggaagaaaaacatgtatcaggcagcaaatgacagatatgagaaaatggcttatgtacgttgcggaaagagcggattaaaactcccggcaatttcacttggattgtggcacaactttggagataccggtgtttacgaaaatatgaaagaaatccttttcacagcgtttgataatggaatcgtacactttgatctggcaaataattacggacctgcttatggaagtgcggagaagaattttggtaagattctgaaagaagaacttggcgtgtacagagatgagcttctgatcagcacaaaggccggttttgatatgtgggaaggcccttatggaaactggggaagcaggaaatatcttctttccagtctggatcagagcctgaagcgtatggggctggattatgtagatatcttctaccatcaccggatggatccggagactccgttggaagagacgatgggagcacttgcaagtgcagtgcagtcaggaaaagcactttatgtgggactttcaaattatgatggtccaacattggaaaaggcagaagcaatcttaagagatttgaagtgtccatttgtgatcaatcagaacagatattctatctttgacagaacaattgagaaaaatggattgaaagacaccgcgaagaagctggagaagggaattattgcattcagtccgctggcgcagggacttcttaccgaccgttatctgaaaggaatcccggaagacagcagaattatgacggacggacgtttcctgaagaaatctgctctgacagaagaaaaacttgtgaaaatcagagaactgaacggactggcagccggaagaggtcagacattggcagagatggcattgagttggattttgaaggatggtattgtaacaagcgttcttgtaggcgcatcaaaaccggaacaggtattggataatatcaaggcaatacagaatacagaatttacagaagaagaactccgcaagattgatgagctgtcgctcgtttaagctagttgtcactgttaatctgtgttatactggttaaaaatgaaaagttgaaaaaggagaatttaccatggatagaattgcaagctttacaatcaaccacctggatctgatgccgggattgtatgtctcaagaagagacgcaaaaggagattgtgtcacaacaacatttgatctgagaatcacagcaccgaacagagagccggttgtggatactccggcacttcatacgattgagcatctggcagcaacttatcttcgtaacagtgagaagaaggatgacgtgatctactttggaccaatgggctgcagaacaggatgttatcttgtaatgttcggtaatctggattcagaggatgttcttgatctggttcttgagatgtgtgatttcattatcggatttgaaggagagattccgggagctgcaccggagcagtgtggcaactatcaggagcagaaccttgatatggcgaagtattatattaagaaatacaaagatgcattggtgaatgaccgtcatcttgtatatccggaataatgtaaagtgggaattgtctgacaagttgttttcagataattcccacttcgattatacagatctgatttttaacataatatagcatgtcactgagaggaattgcaaaaatgcaaatttagttcttaagcaattccgcattcttatgaattgtctcattaacaatattctctacataacttccgatatgttttttgacatccttatccagttcatttggatagatcggagtaccgtattcgagaacaacatgtgttttcttaatctttggaaaatgattttcgaaaatttcagcagtattattcatagaaatcggtacgatcggacagccggtctttgtggcaatcttgaaagcaccttctttgaaaggaagaagacttaattcttcacctttatttcttgtaccttcagggaagatacagatagagataccgttctttacataatcgattgcctgcaggattgtctttaaaccttccttcggattctcacgatcaaggaaaagacaatagacaaaacgcatccaggtagaaagaagcggaatcttttccatctctttctttgctacataacctgtaagattcctgcatctgctgtaagtgagcagaatgtcaaagaagctgcggtggtttccgataaagagaacaggttcatccggtacattctcttcaccgatcacggtaactttcacaccggtcattttcaaaatcactttaaatccccactggacaatacgcagagaactgatgtcacgcgcatgtgggttgaatttaccgatcagccattccacaaagaaaacaggaatagaaagaatcaggtaaagaattagaaaaattgcaacaaaaataaatcgaaacatataatatcctttctttatcttaagaataatagagtcgccataatataaaataactactggcgcatgtagctttattataccgtagcagcataaaaaatacaactgatgcatagattgaagggaaataaaaaaaccggatggcgttactgtttacagtatctggaatattgtaatgaaaaataaaaaacaaaagggcattttagctgtgtttctattgtgtgtctgtttttttataagcggatgtattaccaggattgagaaagagcaaaaacgaaaagatctggaatatattctgatcgaccaggagcatcttccggaggaaatgacagaagtgctcggtcagttaaaaaagaaagcatttcattttgtttattcggatcagggaaagacgtatcttgcagaaggatatggtgcatgtccgacaacaggatatactattgaggtgaagaaactttatgaaacggagcatgcagtttgtttgaatacaagtctgatgggaccggcaactggtgaagagacgaaagaaatcacgacatttccatatatagtcgtggaaatcagtgaaacagaaaaagaggttatgtttgattgaggaggagcaggatggaaattgtgaagagagcgatacgcctgatgcatgagggaaaatgtatttacgatcagtttcagctggacgaagattataacgttccggatgcgaaggaggatgtgggaaatgtaattgaagggatagtctgcgtgaagacggaagatatgaagcttgtagagaattatctgaaaatcagtggaaaagctcaatttaagattttgtatatgacagcttctctggatccgcaaccggcagttttagaaggaaagcttccatttgaagagatggtatatgtagaacaaccgggagaggaagaatatttcctgaaaaatctcagaacagagttcagtgtatcaatggtgcattccagaaagctgagtctgcatctgctgacagaacttgaaattggaagaactcagatgataagtgaagaagtcacggaagatgtggaaagtgaacatgctgtttataaaaaaatgaaaaagtttcgtctgcttggattgtcagacacaaaaaaagacacttatagaataaaagaagagattacattaccgggaacgaaggagagtatcagccagattctgttgtccgaagtgagcggcagaaagttagaactgcgtccgggaacagatgaggtgacagtccgaggggaactacaggtgttctgtctctatctgtcagaagaattgaaggcagactgggtcagtcaggtgattccatatgaaggaaaacttctttgcaatggcctgacagaaggaatgttttattctgtggaacatacgctggaggatacactggttgatatccgtatggatgaggacggtgagatgcggatccttgggattgaagggacattattgctgcggatgaacttttacgaagagcaggagatggagttgttagaagatatttactctttgcgagagcagtgtattccggagaaacaagagacggtttttgaagagcttttaatgcagaaccaatccagatataaactaacggaacggctttcacttccagaattaaaagatgatgtacttcaagtactctgcagcagaggggaaatccagatagagcatacggagtatagagaagaaggaatccaaatagaaggaatcctgcatcttaactttctttacctgcgaggggatgatgcaagaccatatggaagctggcaggggatgataccattccaacatctgatcgaatgttccgatcttccggaaaatgtacggtgtacgatgagtcatcatgtggatcagatccaggtgtctatggcgggcagtgaggctgtagaagtgagagcaattcttgcatttgatgcattcttacggcgggagatagaacttcagacaatcgtatctgtcatggagaaaccgctggatcttgaacagatggataagaggccgggaatcgttggtcatattgtgcaggagaaagaagatctctgggagttggcgaaacagtatatgactacagttgaggggattatgaatgtaaacgaattggaaaatgaaaatgtgaaaataggggataaattgttgatttttaaagaaaatatgagtatactgtaagtactatgtatacaagatacatttgtgtaaattttcacatctggttctttagaaaacagcgatggaggtacacaggatgaatcaaattgaattaaaagcacttgccaagattaatttaggcctggatgtgcttggaagacgcgagaatggataccatgatgtcagaatggtcatgcagtctatctatctgtatgatgaagtgaagattgcgaagaagaaagaacctggaattacactgacaacaaatctgaagtttcttccaaccggggatggcaatatcgcttataaagcagcgcagcttctgatggatgaatttgatctgaaagaaggggttcagatcacgctgaataagcacattccggtagctgccggtcttgcaggaggaagctcgaatgcagctgcggttctgtttggaatgaaccggctcttcggactgcgtctgacccagcaggagttgatggatcgaggcgtgaagcttggagcagatgttccttactgtatcatgagaggaaccgttcttgcagaagggataggagaagaattaagtgtccttcctgccatgccgaaatgtacggtactgatcgccaagcctccgatcagtgtttcgacgaagatggtgtatgaagcactggactccaaagagattgtcgagcatccggatattgacgggatcctggaaggacttcggaagggagatcttcacaaggtcgcagattctatggggaatgtgttagaggatgtgacaataccgatgcatccggtgatcgcggatatcaagcaggtgatgcaggattgcggagcaatcggggcaatgatgagcggaagtggaccgactgtgtttggtctgtttgaaaatcgggcatcagcaagagaagcacagaggatgattcgggacaaaggtctgacaagacaggcatacgtaacgaatatacacaacgttaggaggaagtaaaatgggaactgattttgaagtaacaatgaatgaatatctgcctctgagagatgtggtatttaatacattgagacaggcaatcctgcgcggagaattgaaaccgggagagcgtctgatggagattcagctggcgaataaacttggagtgagcagaaccccgatccgtgaagcaatccgtaagcttgaactggaagggcttgtacttatgattccgagaaaaggtgcagaggttgcagagatcacagagaagaatctaagagatgttctggaagtgcgctgtgcattagaagagcttgcagtacagcttgcatgtgacagaatggatgaagaaggagtgcgtgagcttcgtgcagcagcggagacatttgagtctattctcaacagtgatgatattacacagatcgcacaggcagacgttgcatttcatgatattatctatgctgcaacagataaccgcagactgatccagcttctgaataatctgcgcgaacagatgtacagatacagaattgaatatctaaagaagaaagaatgctacccacagctgttgaatgagcatcagacaattattgatgcgattgccggacatgataaagagctggctacaaagtttacaagccagcatattaagaaccaggcagaaacggttgtcggcactatccgtgagaaagaagaaaatgcttaaaaaataaagaatgtgcctcggcacattctttattctatatgtatggaattcatttttgtggaaagactccatgtatgaacaaaattaatttatcatgttactgttcactcccgtgtcaatcactccgctgattgacacggaggatgcatgttttggcttgaatgcatctcgccccatcgccaaaggcgatttaaaatggcgagatgcgttgctggtcgcacatcgtgtgaacagtaactttatcatagatggaggatgatattatgaagaaacggtttgcactgctcagaagaaagctgaagtctgtccgagaagaaaaactgccgggaagagcagtgattttttcagtggcagcggggcttctgatcgctgctttcttcacaggaatgatatatacaaaacaggaattatatgcacaggaagaaacgcagaagcatctggcgcaggaagtgtttcgctttcatgtgttagcgaatagtgacagcgaaaaggaccagaatctgaaattgcaggtaagagatgcagtattggattatatgaaagaagaattgtcagaagaaccggaagagaaacagtgtcttaagcagactgtgcagtgggcacgtacacatacagatgagatccgtgcaatcggagaaaagacagttgcggcggcaggagaagatcagagtgtgaatgtggctgtaacaacctgttactttcctgacaggacttacggtgatgtgacatttcctgcgggaaattatcaggcactgcgggtagaactgggaagtgcagagggacataactggtggtgcgtgctttatccgaatctctgctttctggatacaacgaatgcggtggttcctgacaaaggaaagaaacaattaaaacaggtactgacggaagaagaatattccaaagtgacagcgaatacaaagtttaagattggctggtatttttggaaataagaaataaaagaggttaagaaaatgtatgaatttgacagcagagtacgttacagcgaggtagatcatcacggtacgatgacagttccggcgttgatcaattattttcaggactgcagtaccttccagtcggaggatcttggaattggtacaacggttctgaaggaagagaaaagagcgtggcttttatcttactggcaggtgatcctgaatcgaaaaccggagcttggtgagaagatcacaatcggaacatttgcaacagaattcaagggattgtttggaaacagaaacttttatatgaaagatgcagatggaaaatatctcgcctgtgcgaattcagtctgggcatttattgatacagagacaggaagaccaaccaggccgcagccaaaggatgttcagttatatggagtagaagaaccacttgatataccatatgagggaagaaaaatccgacttccggaagagacagatgatctggaagcatttccggtcagaaagtatcatattgacacaaatgagcatgtgaacaactgtcagtatgtgcagatggcattggaatttcttccggatgatcttcagattgcacagttgcgtgtagagtataaaaaggcagctgtactgggggatatgatctacccgaagctgagtaaagaagcagacagaatcgttgtggaactctgtgacgaacaggcaaaaccatatgcagttctggaatttaaagaagaaatataaaagaagagatagaatagaaaaactcccggatgttcctacagaaatttctgtgaacattcgggagttttttgttgcgaacaagtaacgttcgcaggtgatatttacttatcaagacttgccaggacatcttccagaacatcctcaacagaatcagttacttcatccgcatagtaggatacaccaggtgcactgtttgacattgcgtagctgtgaccgaccagttcaagcatttccagatcattatactgatctccgaatgccatacattcttccggctttacatggaataatttcatcaggttagaaagagcagcacctttatttgttcccggagcaatgaagtcaatccagatatttccggaagtaacaaccttaatctctgcaccgaacatttcctgtaagtgttctaaatattgcatgattacttttgtgtcatcaatcatattacagattgcaatcttgagaaatggaccttcgattttgcttaggtcgtctacaatttttgttgtgttctgcatgacatttacaatatgatttacaaaagcttcatgattatcttcaatcagacaagcatcttctctggagatgagaatatcaaaattcggtgattttttcacttcatctataatgcggcaggcaaggtcatctgcaattattccgcgagagattacctttccctgatgaatacagatggaaccattttctccgatataggaaatctcgtccttaatctcagaaaacagtctgcgctcattatcatactggcgtccgcttgcagcaacaaagtgaacccctttctgtgtcagttcatgaattagctctatggcacgaggagtcagtttctgtgctccgttatgaagaagcgtaccatcaaggtcgcttgcgattaatttgatcatatgtaaaatcctcctgattattctgcaataacttcttctgcacgtttcagtgcagcgctgatattcggctggaagttctcttttccaaccagctctgtgaatccggctttctccataactttcattggctgttcgttgacgtgggagaagacaaccgtaattccctttgactcacagacctctaccagatcaaccaaagcattcatagcagtactgtccagtgcaggaacgcttcgcatacgaagaacaaggcaggttgtaaaatcttttacgacaatgtgttcgatcgcacttgctgctccgaagaacagaggtcctgagatttcgtagacacggatctggagtggaagtttctgaaggtgttcatcgacatccggggtatcatcatccacataagtccagctgttgacatgtgtttcttcgctcatacgcttgataaagagcaggcaggcaagaaccatgccaatctcgattgctacgaccaggtcgaagagtactgtcaggataaaggaagcaaaaagtacaatgatatcactctttggagcagtcttgaccagttttacaaaggtacgccactggcacatattatatgcaacgataaacaggattgctgcgattgttggcattggaatcattccggcatatggcatcagtacgacaagtacaatgaccagtgtaatggaatgaacgattccggcaatcggagtacgtccgccgtttttaatatttgcagcagttcttgcaatagctcctgtcgcagggattccgccgaaaagggcagaagcaatgttgccggctccctgggctacaagttccatgtcggaacggtgtttaccgttgatcattccgtctgcgacaacacaggaaagcagagattcaatcgctgcgagaacagcaattgtaaatgcgttcggaagtgcattttgaacaacttcaaatgatacagccggaagatggaaggatgggagagagttgctgatcgtataaagatttccaattgtagaaacttttaacggcaggaactgaaccatcaggattccaatgataactgcgatcagagatccaggaattcttttgaagatgtatggagcaatgatcagaacagcaagacttactgcaccgacaatcagtgcatcaatattaattgtagagaagttttcaacaacagcacggaatttctctgttgtctcgatcggttttaccccctccgggtaggtaagcccgaagaaatctttcagctgtccgattacaattgtaacagcaattccggaagtgaatccggttgtgatcgtaaatgggatgaatttgatcagacttccgaaatggcacagtcccatcagaaccagaaagataccggcgaggattgttgcaatgacaagtccatccattccgtctttggcaacaatgccggcgacgattgttgcgaatgcagctgttggtccggcaatctgtacactgcttccgccaagtgcagagatgacaaatccggcaacgatcgcagtgaagataccagcctccgggcctacaccggatgcaagtgccagtgcaattgacagcggcaatgcaataattgctacaatgattccggcagttacgtctttgatgaactgagaacgattgtagctctttaatgatgtaagtaacatcggcttcaatgaattcatttgatagatcaatcctttcttttgtgataactataaaacataacctttcaagtatagcatagaaaaagggacactgagaagaggaaaccgtgtatgtttttaaagacataatgaggaatgttaagagaaaaaagcttgtatctgatttataaaggtaatataataggaataacttgtaaagcatgtcttatataataaaaatatgttttacggtagcaaatttgtgaatagatctgataacaaaaggggtatcacaagaaagaaaaggaagattattatgggaaaatattttggaacagatggtttccgtggtgaggcgaatgtagttcttacagtagagcatgcatttaaagtaggacgttatcttggatggtatttcggacaggaccacaaggccagaatcgtaatcggaaaagacacaagaagaagcagttatatgtttgagtatgcacttgcagcaggattgacagcatcaggagctgacgcttaccttcttcatgtgacaacaacaccaagtgtttcatatgtagtaagaacagaagattttgactgtggacttatgatttcagcgagccacaatccatactatgataatggtatcaaggtaatcaacagcgaaggtcataagatggaggctgaggttgaggcaaagatcgaggcttatatcgatggggagattgatgagatcccgctggcaacaaaagagagcattggccgcacagttgactatgcagcaggaagaaaccgttatatcggtcatctgatttctcttgcaacacgttccttcaaggatatgagagttggacttgactgtgcgaatggtagtgcgtcaagcgttgcaaagagtgtattcgatgcacttggagcaaagacttatgtaatcaacaatgagccaaatggtgtgaatattaatacaaactgtggttctacacatatcgaggttctgcaggagtatgtaaaagagaaacatctggatatcggatttgcttatgacggagacgctgacagatgtatcgcagttgatgagaatggaaatgttgtagacggagaccgcattatttatgtatgtggtaaatatctcatggagcagggaaaactgaaagacaatacagttgttacaacaattatgtctaacctgggactttataaagcatgcgataagattggtatgaagtatgagcagacagcagttggtgacaaatacgtttacgagaacatgcttaagaatggatatgttcttggtggagagcagtccggacacatcatcttcagcaagcatgcacgtacaggtgatggtatcctgacatctcttatggttatggaagcgatcattgagaagaagcagacacttggaacacttgcagatgaagtgaagatcttcccacagcttctgaagaatgttcgtgtaaaggataaaaagacagcactggataacgcagcagttcaggcggcagtagagaaaacagctgaagaacttggaacagacggacgtattcttgttcgcgagagtggaacagagccagtgatccgtgttatggtggaagcggcttctgacgagatttgcgagaagtatgtagacagcgtagtgaaagtgatcgaaagcgaaggtctttgcgagtaaataattaagaagagagttgtcgtgtaagacagtaaaagatgccttgtgaaatatagtttttcgcgaggcatcttctttgttcaaaaaaagaagggcgtgtgaaaaaacgagagttttttcatgcgtccttttgcttatgattataataatagttatattacataaaaaagggcataattccccttcccccataagaatgctattatgaactcctatgcggtagctgcaacttttttctgtttgttgtgatatttataaagattgtgtccgatagaaacgagaaatacttcaagcaatacagattttatccctcttcggacaattcttttgtaccaccggtcgtttttcatgataccaaaggtaccttctgcctgaatggatcttttcatccttagaagcgctccctggatactttcgagattttctatcacttcctgatgcatcgctgtaagttcgcggttgatccgaacagtacggtttttgtctgtctttttacattgttctgcgtatggacacccggagcagtcttcacactgatacacttcttcctgtcgcccatacttgttcccttttacgttttttcgatactgaagataaaagtttttcccgtttgggcaacgcatgattccgtcttccccgattggaaaatttactgcacgaaatggatcttcatggtatttcttgtccgtagtttctttcttgaacatgggaaacttcatatatttttccattccttgctgctcacagaagatgtaattgttgtaagaaccatagccggcatctgctactgggtacttcggatagaagccatatgtagtataaaacttgttcattaatggaataaaacaatccatatctgaacgatactgatttacatcaacaacagcaatgtattcatctgcaacaccgacctgtacattataagctggaagcaactggtcatttcccatgtagtctgtcttgattcgcataaaagtggccgaatgatctgtttttgagtagctgttgcgatcttctccacagattttgattttttccacgtattcttccaacttagcagcataccctttgagtttctcataatgacgttgctgtgtagttttgcgatgtcccctgccatgaacaaatattgcttcattaatctgccagacttctgcatactgttcagcagcttccttcagatactctggtgcgtattcactattgatacaaagtttcatacctgtacatgaaagttcctcattgatttcctcaaagagtgtagtgatcttaccaaagagacggtatctggatttttcggttgcttttttccatacccaggagtatttattcgcatttgcttcaaacttggatccatcaatgtatagatgttgaagatccacatgttctgtcttgaagatttttttgtttatgtcttgaaatatttcttcaatggaatcagcaagaacttcgttgatgaagtagccgaaagtgcggtaagaaggtgcttgatgatccataagatacatgaagcggagattcactttacactgatcctccagttcacgcaatgatatatagccattcgccataaatccaaacaaaactgttttcagcatactgaccgggtcatacctgagtcttcctgtattatgttgaggaatatttttcagatatttctccagttcgatttctcccataaatctatcaaaagtcagcactggatcacagatgtccaaataatcttgaattagcattggcaaaactgcctgttttgggttagaatagattatgttattaattttcattgcaagttaattataacagaaagaaagaccttgagttcattataaactcttggtctttctttttggggggactattcttttttcacagccccttttttagttgccaagcatatgagaaaacagtccactggcctgtttttgagtgtttgagtcaaaaaatgttaacactaagaaaataaagtgtcactttgtgttaaaattttgataaaagcttcttttagtgtcgggaatcttttgaagaaaagacatagagagattcccagaatataattgtgccataaggtgagcaggaggaggtgttgatatggcacacaggagttcaaaagaacaggtttacgaatatctggagcagatcacaaaggaatttgactttgaacatcttacgcgttatacaacattggacatctgtaataaattgaatatgtcgcgttctcttgtttccttatatttaaatgagctggtaaaggaagataccgtaatcaagataagctccagacccgtatattacttgaaccgtgcaggattggaacgtaagttccatatgcagcttgcccagaatgagtatctgggtatccaggaactttcgggtgagattaagagtaatattccagaagagaaggactttgaaagagcgatcggccatgaaggcagcctaaattactgtatctcgcagataaagtccgcgcttgtatatccaggaggtcttccaatcttattaaaaggtgagccgggaagtggaaagacttatctgatgagattgatccaggaatattgtgtgaataacagattgttaagtgattctagaaaaagtcggagaataaagctgaatcagatcagtgatggagaacaatatgagaagctagagcagctattatcagaactggaagacggcattctgtatctggaggatatatctgcatgtaatgccagagtccaggaacgtctggcagagtatattgccaacggggcaaagaagaaggggcggagcgtaaaaaaagaaaatgtccgtctggtcatgagtgccgacgagaagatgttctcacagatttccagaaaattactggtgaatgtacctgtgatctgtgaaatcccttcgtggattgagagaaatgaagatgagaggaaagcatttgtcgtgaagttctttaaggaggaacaggaacaactcggcagaaccttatatctttcagaaaaattgatacacaagcttatgaattatcagtttgaacataatattgccgaacttaagcagtgtgttactatggtctgcgcaaatgcatacgcgcaggattcatcagaagaatcgttggaaatctatctttacaatctgccggcaaagctgcaaggaagcataagtatgaaagaacaggatgccactctggtcagattagatgtgatccagtcagatcctgcggcagataagatactggagctgtggaagaatcttctggataactatagatattctgccggcgcaggggaaagctttgcgacatttttggaactagggaaaaagacactaaagtattattatgatatattgatctttcaggaattattttttgatgagagactaaggcctttggagaagatcgtcgttgaaatgatcgcaagtattagaagctcctacaatgttaatttcccagtaaattgtgcttatgtaatcgcaagaatgatggttgcacagcagaatcataattcaaggatacagatctgggagagggagcaccgcgaggagatccagaagatttataatctgttggtcgataatatgccgaatattaattgtcttacagagcttctcgataaacagattcagtctaatacaaacatacagctttcttatatgaacagagtgtttatcatgatgaacatttattcttataatcacaaattgaagctgatagatacagcaggtgttgtgctgtgccatggttataggaccgcaagttctattgtagatacagttaatacgatcttacaagtacaggtatttgaagcgatcgatatgccgcttgacagttccatccatgatgtcatccagaaattatctgtgttcattgaaaaaaatagttattttaaaaatatgatcctgatggtagatacagggtcattggaaggcttgggagagattattgacggttctatgaatcttggaatcatcaataatgtttccacgatcctggcattgcatataggtgaaaagatgctggcaggagagaagatgcgggatatcctggagacggtatgcagggagaatcaatgcaggtatagtatcatcagccgcacaaagagagagaaggcaattgtattcgcaagtgacgcgggaagaaatattgcagagaagctgacccggctgtttaaggacagtcttcctaagccgataccgcttgagatgatagcatatgattatgacgcgttattcaaaaatggcagcaaggatgtcatttttgaaaaatacgatgtactgcttctggttaagacgctgagtcttaggattccaggtgtcaagtcggttacactggaagagatcatgaattttaacaacattaatgtagtggatgaggttctgtcttattatctggaggaaggagagatcgagtactttaatcagaagctgctgaaaaacttttcactgcagtcagttcttgagaatctaacgatcttaaatgctcagaagctattagattatgtaagtgatgcaacaacccttctgcagcagatgctgaagagaagattcctgagcaagacagtgatagggatcaatatgcacatctgctttctgatcgaacgccttgttacaaaaacgccgattgagaattatgagaatctggatgcgtttgaggcagaacagcaagaatttatcaatatcgtaaatgaaagtttccacacactggtaagccactataatgtagaactgccggtcagtgagatcgcgtatctgcatgaatacatcaagaatgatgtaaaagtggagggaaacgagaatcaattttgattacaactttatctgggcaaagtaaggccgagatcatgaagactttgtcagataaagatgtaaatataggaaaggagcttttatgcaaagactagtattagcatcccatggttatcttgccgagggaatgaagaatagtgcacagatcatcgtggggaagtccgcgaagatatatactatatgtgcatatgtcaaggaaggaataacactagaaagccagattaacgaactattcgacagtttcccggaggatgatgagatgatagtagttacagatatatttggcggaagtgtgaataacgagtttatgcagcgattacagaatagaagattctggcttgtctcagggatgaatctgccgttagtgatccaattggcaatggcagaagatggcggctgtatatccgaaagtattaaagaagcgctggagactggaagagagatgatctgtttctgtaatcctatggtagaagttgcttctaaagaacaggaggagttttgatacaaatatgaatagggatcaattatacgcgatgaatatccattatcgctattatgatctggaatatttcttccgggcttgtcagaagatgaaccttaagcatgcagaattgtggctctgtccacagcatttttacataaatagcatgtggtctgagagccctgagaaattgaaaggtctgatgaagcggtctggcgtacagatatcttgtatctgtccagaacagaataatccgaaaccgaataatatagctgcaagatctgagcttttgatcgagaatacaagaaaatattttcagaatgtgatcatacttgcctcagagttgggctgtgacaagatacttgtaacaccggggtggaactaccatgatgaagaagtagatgaagcaaggaaaagatcaatcagaatgctgcagagcttatgtgatatcgcagatccatatggaataagccttgcaatggaaagtatctgggatcactcttcagatattgctaatacaaaggaaaaggttaagcttatcaaggatggtgtagatcgcgaaaactttaagctgacagtggaccttggagcattaggagcagtgtcagagtctatagaagaatggtttgcactctttggagaggatattatacattgtcactttacggatggtaagccggcaggctgtccgaccggacatatgccgtggggactgggagagcggaatatgcttgaagttcttaaggcatttgaggcaaatgagtataggggcggattttctatggaatatgtggatgcaagaagctttaggaatcccgaaaagtgggacaggcagacagtagaacagtttgaatcctgtctggagagaatgtaggaggtaatagtagatgattaagatatgtaggatcgatcatagattgctgcatggacaggtagctttcgtatggtgccgttcactgaatgcggatgcgattttgatcgtatctgatgcggtggcaaaagatgagatgcgcatggcgacgatgagactggcaaagcctgcaggtgtaaagctggtgatcaagagtgtcgaagattctattaaagtgattaacagcggagtcacagataagtataagcttatggtggtggtagaaaatgtacaggatgcctatgatcttgtgaaggcttgtgagaggatcaagagtgtgaatcttggaggaagcaagattgaagaaaaccgaagaaagctggatacggcgttctatgtggacgacaatgactgcagattgttgggagagcttttagatcatggaattgaacttgagattcgtcaggtgccagaagagaagaaaaagattgttacgaaagacatgttgagttaattgaggaggaaatatatatgctacaggcaatattgatcggacttattgtgtttattggaaaagcagattattttatcggaacagcaatgtttggaaggccgcttgtactgggtgctctggtgggaattgtactaggggatataccaacaggcgttatgataggattccaactggaacttatatttatggggatgcaggcgatcggagcttctattccgccagatatgatcgtaggttctgtccttggcacagcatttgcgattacgacgggaaaaggtatggagaccgcaattacgatcgctatgccggcggcaatcttgtcagcgtttgttgtcaatctattctatggcgtcattacgccgatcatggcaaaggcggcggaccgctttgccgaggaaggtaagtatatgaagattgaaggtgtatttttaagtaatggattcttgtttgacctgacgttcgcagtgattgcctttggtgcatttctctttggcggagattcagttacggcagtggttaacgcaattccaggatggctgacgacaggtatcggtatcgcagcaggcattctgccggcacttggttttgcgcagcttatcaatatgatcatgaacaagaaggttgcggtattcttcctgttaggattcttgttaagcgcatatatgggaatatctacggttggtattgtatgcttctcagttgttatagtgggaatcttactgatcgtgaaggattttgtaccgaatcaaccagcattacagggaggaatggatgatgacaatgaattctagaaaaacattagagaaaaagcagttaaagagtctcttctggagatcatttaccacatcacatgcatggcattatgagagacagcagcatatggcatttgagtttgctatgataccggtcatcaacaaattatatgacaaagaagaggacaggatagatgcatataagagacatatggaattctacaactgtcagacggctatgcagccttttatctgtggagtggcagcggcgatggaagaagagaatgccaataatgaggagttcgatacctcttccatcagcgccatgaaggtagctcttatgggacctcttgcaggtattggtgattctctgatcggaggaacactgcgtgtgatcgcgactggtattgtagcaggtctgtgcatgagcggaagtctgttaggaccgatactcttccttctgatctacaatatcccgacgatcttacttcgttacttcggagtgaagttcggctatgggcttggtaatactttgattagtaagctgtcagagggagacctgatgaagaaattgacgatggcaatggcaatcgtgggattgatggtaattggtgcgatggtagcgatgactgtcgcggtaacgacaccgatcgcgttcaatatcaatgatacagcattttccttacaggagactctggatagtatcttcccgtgcctgcttccgatggcagtgacattgggactctataaattgaataagaagcatgtaagtgttcttgtgcaggtgatcggtatcatggtgctgggcattgtgcttggggcgataggaatcctgggctaaaggtacgataaaagataaatagaaaatacggaggagagaaattatggaatattgtttagatactggcgatcttgagatggtcaaaaaggtggcagacttatacccaatcaggtgttttagcatgaacccgagtatagcggtgaattgtctaaggggaacaggaagaaccttccttcagaatgcaaagatgatccgtgaagtgatcggtgaggacactccattttatctggaggcaatgggtgatactgcagaagagatgattgaggatgcgcataagatacgccaagagatcaagggaaatacaatgatcaagatcccggcgtgtccacaaggcttcaaggcaatccgtctcttaaaggaagaagacattctatgttcctgcactgcgatttatgattttaaccaggcaatgttggcggcagaggcgggcgcatattgtgtggcagtgtatgtaagccgtgttgataattcaggtggagatggaattgaggtagtaagaaagatcaaggaagcatttgtgatggaagggattgcgtgcaaagtgtctgccgcatcgctaaaacaggtaaattatctggagaaggcagccctcgcgggagctgacaatgtgacagtaaccttggatctgcttgagaagatggcgatacatccattgacacagaagacgttagatacctttaaggcagactgggaaagcctgtttggagaaggaatgcgggttgccaatatgacagaatgatctatggagtgagtgacaagatgagcagaaatacaaattaccgggcgtgggggtctgtgggacattacctgcagggtcccggcctgctggaagaaattgagagttatacaagtggattcggtacaaagcatttctatatcattgatgtatttttctttgatacatggacacagaagctggcagagatctatgaaaacagtaaaagtacctttcaaagtgccgtatttgaaggagaggttacccgaagtaagatcagggaattccatgaacaggcagtgggaagtgacattgatacggtgatcgcgataggcggagggaagtccattgatgtggcgaaagtaatcgcggcggatcaggagtgttcgctggtagtctgcccgacgatcgcgtctaccgatgcgccgaccagtgcaatgtccatcttgtatagtgaagagggaaagatgaatgagatcatgctgcataagaagaatccggatctggtcttagtagacagtaagatgatcgccaatgctccggtccgtttcctggtggcaggtatcggtgatgcattgtccacgtattttgagggactttctaatgttcagacacagcatgagaactatgtgtggtgtgacaagaagccatttgtgagcacactcagcggacgggcggtcgcgaaagagtgctttgacaccctgatggcagacggaatccaggcgaagctggcatgtgagagacatatcctggtgccggcgcttgagaatattattgaaagtaatattcttatgagtggccttggatttgagaatgtcggctgctctgtggcacatgcgattgggaatgcgattacggttcttccagaaggagaacggatgatgcatggcgaaagggttggattcggtgtcgtgtgtcagatgatagcggagcattataatcaggagatgatagatcaagtgcttagcttttgtgtggatgtcggtcttccggtatgctttcatgatctacagatagaaccttccgaagggaatctacatctgatagcaagggaatctctggaagcagtatcctggcaggcatgcagcagaacttatggggaagaagatattgtgcagattatgcggatggcagatgcattaggctgttcttatctttctaagaagtaaaagaggaggatgccagactggcaggagagtttgtgaagcttgcgaagtctctggattcgatggtgacgatcaagaaagcggacaaagaagtcgatgcatcgaggcttctgtctctgatgggattaggtgtaagatgtaacgatgaggtgatggttcgtatagagggcggtaacgaagacgcagcatatgatgatatgaaacaatactttgaggcgaatttataagggacaggggctgtcgcactaaaatagaaattgaattgctccccgtcaagtagacaattgaaaaaatataaatttttcctggggctgtgaaaaaagaatagtccccccaaaaagaaagaccaagagtttataatgaactcaaggtctttctttctgttataattaacttgcaatgaaaattaataacataatctattctaacccaaaacaggcagttttgccaatgctaattcaagattatttggacatctgtgatccagtgctgacttttgatagatttatgggagaaatcgaactggagaaatatctgaaaaatattcctcaacatgatacaggaagactcaggtatgacccggtcagcatgctgaaaacagttttgtttggatttatggcgaatggctatatatcattgcgtgaactggaggatcagtgtaaagtgaatctccgcttcatgtatcttatggatcatcaagcaccttcttaccgcactttcggctacttcatcaacgaagttcttgctgattccattgaagaaatatttcaagacataaacaaaaaaatcttcaagacagaacatgtggatcttcaacatctatacattgatggatccaagtttgaagcaaatgcgaataaatactcctgggtatggaaaaaagcaaccgaaaaatccagataccgtctctttggtaagatcactacactctttgaggaaatcaatgaggaactttcatgtacaggtatgaaactttgtatcaatagtgaatacgcaccagagtatctgaaggaagctgctgaacagtatgcagaagtctggcagattaatgaagcaatatttgttcatggcaggggacatcgcaaaactacacagcaacgtcattatgagaaactcaaagggtatgctgctaagttggaagaatacgtggaaaaaatcaaaatctgtggagaagatcgcaacagctactcaaaaacagatcattcggccacttttatgcgaatcaagacagactacatgggaaatgaccagttgcttccagcttataatgtacaggtcggtgttgcagatgaatacattgctgttgttgatgtaaatcagtatcgttcagatatggattgttttattccattaatgaacaagttttatactacatatggcttctatccgaagtacccagtagcagatgccggctatggttcttacaacaattacatcttctgtgagcagcaaggaatggaaaaatatatgaagtttcccatgttcaagaaagaaactacggacaagaaataccatgaagatccatttcgtgcagtaaattttccaatcggggaagacggaatcatgcgttgcccaaacgggaaaaacttttatcttcagtatcgaaaaaacgtaaaagggaacaagtatgggcgacaggaagaagtgtatcagtgtgaagactgctccgggtgtccatacgcagaacaatgtaaaaagacagacaaaaaccgtactgttcggatcaaccgcgaacttacagcgatgcatcaggaagtgatagaaaatctcgaaagtatccagggagcgcttctaaggatgaaaagatccattcaggcagaaggtacctttggtatcatgaaaaacgaccggtggtacaaaagaattgtccgaagagggataaaatctgtattgcttgaagtatttctcgtttctatcggacacaatctttataaatatcacaacaaacagaaaaaagttgcagctaccgcataggagttcataatagcattcttatgggggaaggggaattatgcccttttttatgtaatataactattattataatcataagcaaaaggacgcatgaaaaaactctcgttttttcacacgcccctcttttaacatctaatagaaaatatttatttgatttaaaattaatcgatatatttcagccatccttccggtgcttcgatacgtcccatctggatacctgtcagtgtgtcacgaagttttgcgattgtaggtcccatctgttccattccacttgggaagcagatctcttctccgtggttgacgatctttccaacaggtgagataacagcagctgttccacacagaccacattcggcaaagtctttgacttcatcaaagtatacgtctctttcttctaccttcagtcctagataatgttcagcaacatacatcagagaacgtcttgtgatagatggaagaattgttgaggaatgtggtgttactactgtgttgtcttttgttacaaacaggaagtttgcgccacctgtttcctcaacttttgttcttgtagcagagtcaaggtacatattttcatcaaatccatttgcatgagctgtaacaattgcgtgaagactcattgcgtagttcagtcctgctttgatgtgtcctgttccatgcggtgcggcacggtcaaagtctgatacgcacagtgtcagtggctttacgccgcccttgaagtacggtccaaccggagtggcaaatacacggaactgatagtcagtagccggttttacaccgattacaggattgattccgaacatataaggtctgatgtaaagtgttgctcctgttccgtaaggtggaacgtaagcttcatttgctcttactgtctgaacaatagcatcaacaaatctatcttccgggaaaggcggcatctcaagacgtttcgctgagtcgaccatacgcttcgcattgaggtccggacggaaagtgacaatgtgtccatcctcagttgtgtaagccttcattccctcgaatactgtctgggcatactgaagaactccggcacattcattcatgacgatgttaggatcttctgtgagaccaccttcatcccatgctccatctttataattagctacaaaacgcttatctgtagggatatatccaaatccgatattttcccagtcaatgttttttttctccattgtagtaaatcctccattcctttatgcggcgaaagaccgtatgatttctaattaacgctattataataccgtcaattaaaaaaatcaagagtgcgctctgttttttgaaaatgtttttgttactgttcactcccgtgtcaatcactccgctgattgacacggaggatgcgcgttttgacttgaatgcatctcgccccatcgccaaaggcgatttaaaatggcgagatgcgttgctggtcgcacatcgtgtgaacagtaacatgttttacggacatgtaagtgtcagaatctaaatcctgcaactaaacagttacaataactgtctgatatccggcgcgcttcaaccggcgttccatttttacagcttcgtcaagcgtatcgtattctccgaccgttacccggaataggccatccccttctgtcaaaacagcaggaaaattcaattcagttaattcattcaggagtcgtcgggcatatcgttcgctgcggaaagccccggtctgcaccgcatagtgagggagagaagaagcattgctgatttctccgttttcttctaatgtatcaaggattccctcagcaatcgcaagcgcaatatcatcaaagttatcatcaaagagccggttatcagtgtcagagttgataaatccgacttctaccagaaccgccggcatctgtgtgcggcgcagaacgaccagaccggggcgctcttttacgccgagattgatgaagccgagagcttccagaccttcattaatattttgagccattgtgtatttcagaccggatttgttgtaaaccagagattctacgccggatacggtattatctgtcggataagaattacggtgaatagacagaaagaagtctgcaccggctgcatttgcttccaatgctttctgatatggagattcataaatgtctgttgtacgtgtatagagtacatcaattccatgttcctgcagcagttctccaatggcaagtgttaaagataaagtgtcatccttttcccgtcggccgttatagacagccccgggatcacgaccgccatggcctgcatcaagcatgatagaataagacatataatcacctcattattttgtgcttctatatattatatgaaagcgtgcattgcctgtgaaacgtcaaaaaatgccggctgcgataatacagccgacatttcaaaaagttctattcatgtgagtgtttatcagtttcagaagaatcagaagtttctccatccgcttcttctgtatctgttctttcaggaagataaacatgtaccgtttctacgcggttcttatccaacttctcgaccaccagacgaattccatcttcagtgacaacttcatcacccatctgaggtaaacggtccagatgttcgatgatcagtcctccgagagaatcataatcctcagagtcaagttctgtatgtaagtgatcgttcacatcatccagactcatggagccttcgataatatattcatgatcagaaatctctttgatcagttcatcttcattctcatcatattcatcatggatctcaccaacaatctcttccagaatatcctccaaagtgatgagtcctgccatctcaccgtattcatccagaacaattgcaatattaaaagtagaatctctcatctctacaagaagttcggagatatctttgaactcataagtgaaatgaggttttcttaagaaatcccggatattgaacggtgtatcatgatcataaagaagcagatccttcatgttaataataccgacaacgttatcctgtgtctcttcgtaaacaggaagtcttgtgaatttgtcttcacggaaaatatcaatcaattcatcgaaggtactattgacatcagcaaatgtaacatgtacgcgaggaaccataatatctttcgccttggcatcgccgagatcgaatacattgtagatcatctctttttcatcagactcgattacaccatcctcatggctgacatccacaattgtacgaagttcttcttctgtcatagctttgttcgctgcatctggatctacgcgaaggatcagcatgattccgcgggaaaacaagttaatgatgaaaataaccggagtcatgaccgtcataaaaaacttgatgaccggaatataacgaagcgtaagtttctcagcgttgatcgttgcataattcttcggtgtaatctctccaaatacaaggattgccactgtcagaatcagtgtagcgatgctgaccatgtatccgccaaatgaataagcaagggttgtggcaagagaagatgctgaaacattcacaatattattaccgatcagaattgcactgagcatctttgctgtgtgattctctgtgatatcaagagccagagccgcccgtttgttcccaccgtctgcgagagaacggagtttaatcttattcactgacatcagcgcagtctcggttgatgaaaaaaatgatgaaaacaatagtaaaattaacagtataattaataggtacgtgtcacctgcgtccactttaaatattcactcctttgattaaaaaatgtgcctctaaagaggcttggttaattttagatatacgcattcattatacatggtttattagtgtttggcaaggcaatatactttactttatgaagtgggtggtgtatgatgttgatgactgataagaatatttaatactattatatagaagaaacggagtatagatatggaattatacaatagattgtgcactattacaaaacaggaaaatgtaatgaaagatgagccgatgaagaaacatacaacatttcgtattggtggtccggcagattatttcgtgacacctgaatcaaaggaagagatccaggcaattgttgagttatgcaaaaaggaggaaatcccatattccgtgatcggaaacggaagtaatcttcttgttggagataagggatatcgtggcgtaattcttcagatttttaagaaaatgaatcagatcagggtagaagagaacaagatttatgccggtgcgggcgcacttctgtcgaagatcgcggcaacagcactgtcagaatctctgacaggttttgaatttgctgccgggattccgggaacattaggcggagccgttcgcatgaatgcgggtgcatacggtggagagatgaagcaggttcttgagagcgtgaaagtgatgacagcagatggcggattccttacgattcctgtagaagagatgggacttgcttaccggacaagtgtggtagaacagaagaattatattgttcttgaagcagtgatttctcttgaaaaaggaaatccggagaaaattaaagaagtgatggatgatctgaaagaaaaaagagtgacaaagcagccattagagtatgcaagtgcaggaagtacatttaagcgtccagaaggatatttcgcaggaaaactgatcggagatgcaggacttcgcggattcagggtcggagatgcacaggtctctgaaaagcattgcggtttcgtgatcaacagaggaaatgcaagcgcagcagagattatggaactgatgcgtcaggtagaagataaagtagaagaaaattcaggagtccgcctggaagcggaagtaagaagaataggagagttttgatatgcgttttgttatcgtaacagggatgtcaggagccggaaaaacaacagcacttaagatgcttgaggatatgggatatttctgtgtggataatctgccaatcgcaatgtttcctggatttgtgcagatgatcgagaattcagaaactccaatgaagaaagtggcattgggagtcgatgtgcgaagcggacaggatatttccggattagagaaagatcttgagcagatggatcaaaaggggatcaaatatgagattctgtttctggacgcaaaggattctgtacttgtaaagcgatacaaagaaacgagaagacagcaccctctgagcggatcgggacgtgtggataccggtattgcgaaagaacgtgagaagaccgcatttttgaaaatgaaggcaacgtatattcttgatacaagtaagatgctgacgagagaactgaagattgaacttgagaagatttttgtgaaaggtgagagcttttgcaacctctatatcacagtaatgtcctttggttttaaatacggaattccgcaggacgcagaccttgtattcgatgtgcgttttcttccgaatccgtactatattgatacattgaaagaaaaaacaggaaatgatccggaagtccaggattatgtcatgcagaatgataagggaccgattttccttgaaaaattaaaagacatggttgaatttctgattccaaattatattttggagggaaaaaaccagcttgtgatcgcaattggatgtaccggcggaaagcatagatctgtaacgctggcgaatgcgttatatcacacgcttgagaccgaggaaagttatggtgtccgtattgaacatcgtgatattgggaaggatagtatcacaaagagaaagtaaaaggtggaaaatatgtcattttctggaaaagtgaaggaagagcttgcaaggaacatcagttcagccagacattgccagattgcggaactgacggcttttattggcatgtgcgggactgttgtaatcaatagttttgaccggtgcagtatcaagattcgtacagaaaacattttagttgcaagaaaggtctttacattaatagaaaaaacatttaatataaggagtgatatttccgttcggaggaatataaagaagcagacagagaactattccgttatcgtaaaaaaacatgaagatgcgatacgtatcttacaggctacgaagatgatgggggaacagcaggagaatgcggaagagttgcatgccgtgaatccgatgattgttcaacaggtttgttgtcgaagagcatttctccgcggagcgtttcaggcgtccggatctatgagtgatccgaacaaggcatatcattttgagattgtctgttccacagaagagatggcacatcagatctgtgacctgatctgcagtttttctatggacgcaaagatcgtgctcagaaagaagtcgtatgttgtttacctgaaagaaggagcacagatagtagatattttgaatatcatggaggcacatgtctcattaatggaacttgagaatgtaagaattctcaaagagatgagaaattctgtgaacagaaaagtgaattgtgaaactgccaatattaataaaacagtatcagcagcagtgaaacagctggaagatattacatatttgagagatcagataggatttgagaatataccgaaaggattagtcgaggctgctcttgcccgtctcgagcatccggaagcaacactgaaggaactgggagaatccctgaatcctccggttggaaaatcgggtatcaaccacaggctgcgtaagctgagtgagatggcagacaaagttcggcaagaacaaggaggattattatgattaagacatctgttgtagtgaaagcggacccagggtttgatggacggccgatcgcccttctcgtacaggaagccagccagtatgcaagcaaagtgtacattcaggtagccgagaagaacatcaatgcaaagagtattatgggtatgatgagtctgaatctgatcggaggcgaggagattaccgttgtgacagacggcgaggacgagcagaaagcagctgaaggcattaagacattttttgctaacgtataataacaataagatggtaattgaagtcacagagagataaccaagtgattacaaatgaatatagaggggctgtactttgaagaggagtacagccatctttttctatgggggagagtttgcagctgatgtgaacacaaatgatttttgaataaggaggtatttgtttatgaaaagaatgctatttgtttacaatccgaattcaggaatgggacttctgaagccgaaactttcagatgtgattgacacttttgtgaagggcggatatgaggtgacggtttatcctacacagagaagtcaggatgctgtaagaaaagtcagtgagtacacagaagaatatgatctcgtgacatgtagtggcggagatggtacattggatgaagtcgtgaccggtatgatgatgcgagaaaataagacgccgatcggatatattccggccggaacgacgaatgattttgcaagtagtctgcatatttccaagaatatgctggaggccgcagatacaattgtaacaggaacaccattttcttttgatatcggtcagtttaacgatgactacttcgtatatattgcagccttcggcattttcacagacgtgtcatatgagacgaagcagagcatgaagaatattcttggtcatatggcttatattctggaaggaaccaagagactgttcaatattccgtcttataagatcaaagtcatacatgacggagagacgattgaagatgagtttatctttggaatggtgacaaattcacgctctgtaggaggattcaaaagaatcacaggagaaaatgttatttttgatgatggtgtttttgaggtgacactctttaaaacaccaaagaatccagtcgagttgaacgaactgcttggggcaattgtgatgcgtcagattaattcagacagaatatactccttcaagagtggtgaagtccgttttgaatctgttgaggcaattccatggacgctggatggagaatacggcggtactcatgaagaagttgtaattaagaataaaaatcaggcacttcagattatggtcaaggaagaagccgtagaagatctgagtgaacagttggtggaagcagaggaagtctgaacacataatctgaaatattttcagtgatattttagaaaatcaccccttttttgaatttgaagcttgttgaacaattgccgaaaaccgcgtaaaatcaaggaaaaacggcaatttgaaagaaaagtaaaaattttttgaaaaaaattaaaaaaaggggttgcattttctgaaagcctggtatataataactattgtcttgtggcggtaacgaaaaagacacagacaaaaatgaataaggctccgtggtcaagcggtcaagacgctagcctctcacgctggaatcaggggttcgattcccctcggagtcactgaaaaaagctcgtatttacgagctttttttgtgcttgaaaatcataagtgaatcaattagtgaatcaaacgtgcgttcggcacattttttgcaaaaaattataaggaggaaatcttgaacatattcccctcagagaatttcaagcgatcactttactagcgaataaaaggaaaaagaagaataaaaatgccttggcaggtaattcatgtgtgtgtgcatctgaagaacaatgtcagggcatttttgattattactagagtgtgtgtcgaaagtctgtaaatacatagacagagttatgttggacactataggataaaaaacttttttaataaaaaagccttgattttaggagcttttttagtgtcgaagaaaaagttggcacagttcttgcagtatataagggcagaaagaaaagaaagagaggaagaaaaaattgaaaaaatttttattcgcaacacatggaactttggcagcaggggcgaagagcacattagaattactcataggaaacgttgcagatattacttgtttgactgcatatgtaaatccggatgacaatgtggatgaacaactgaaagcatatttttcagaagttagtgatgaagatcaggtaatcgtatgtacagatctgatgggtggaagtgtcaatcagaaaatcgttccgtacgcacagaaaaaaaatgtatttctgatagcaggattcaatctgccgctgcttctggaactggcaatgaacgaggataaagtcacagaggaagaattgttggattctatagaagagtccagaaaaaatatgatgctcgttcgggtagaagtaacggacagcggaactgagaaagaagaggaagaattcttagcataacaaaaagaaaaggagagaaaaaagatgattgtatgtttaagagtagatgagagattaattcatggacaggttgcaatgacatggacaaaggaactgaaactgaatggactggtagttgcaagtgatgaggctgcatcaaatgagattcagaaaatgacattaaagatggcagtgccggaaggaatcaaatgtatcatcaagtcggtagaagatgtgacaacaattctggatgatccacgttcagagtctatgcgtctgatggtacttgtaccgatggtaaaagatgcagttacattgtgtaaacgttacaaaaatattgaaatggtaaatatcggaaatgccggtaaaatgacatccggagaaaagaaaatcttatcaaaagaagttatgctgacagcagacgaactggaagcactgaaagaactgacagagctttatccggacacatttttccagggaacaccggcgatggaaaagaaaatggcatctgcaatattaaagggatgttgattaaaataggatagaggaggatgagatcatgatgttagatgcattttttgtagcactcgctgtttttgtgggagttgcaggacatgaactttttggaatggcaatgttgagcagaccgatcgtagtggcaccgctggcaggactgcttttgggagatgtgcagacaggacttattgtaggtgcatcattggagtcgatttttatgggagttgtaaacatcggaatatccagtacagcagaaccggcacttgcagccggacttgcaactgcttttgcaattaatctcggaggaaatgtcggaaccattattccaatcgttttcccattggcagtgcttggattacagttaatgaactttattttctcttttgtgattggtccgtgcgcaccgaaatttgaagaacttgcaaaagaaggaaaagataaagaaattacaatacttcattttggtttatggttcgtacattatgcgttatatgcattgattccgttttttgcagtattgtttggttcggatgctgttcagcgtattctggaaatgataccggatgtaattatgaacggtctgacggtagcgggaaatatgcttcctgcagttggtatggcaatgcttctgcagatgctctgggataataagattgcaatctatttcctgctgggatttattctcgtagcatatttggatcttccactgatcgcaattgcagtattgggaacaattattgcggttgtgacagcacagcgtgatatgcagttaaagaacaatcaggcggcaccggtagaaaaaacgagtgaagaggaggactttttcgcatgaaattaatgaataatgtcagtaaggaagagaaaaaattaatcagaaaaatgttctggagatccggagcaatgtatgcatcagtaaatccggttaccatgggaggaggcggtttctgctattccatgattccgtttatcaatcatttttataaagataacgaagaaaaaagaagagaagcattgacacgtcatgtgaaatatttcagtacgacaattccgatggcatcttttgtaatgggaattgcaggctccatggaaaaagagaacagtgaaaaaacagattttgatgcaggatccattaactcaatcaagctgagtctgatgggaccgctggccggaatcggcgattccttattctggggcgtatggcgtgttgttgcagccggacttgcaatcggacttgccaatgcaggaaatgtgcttgcaccattgattttccttcttgcatttaatattccgaactacctgtgccgttactatggagcgtttttaggatattctcttggcgcaaaatacatagaaaagatttattctaacggaatgatggagattctgacgaaggcagcgggcattgtcggactgattatggtcggagcgatgacgagtaaaacggttctgtttacgacaattcttgattttacgatgaaaggaaaatccgtaatggatgtacagtcttctcttgacagtatttttatcggaattgtaccgcttttgcttacatttggatgttttaaactgttaaagaagaaagtaaatatcattgttttgatctttggaattgttgcattgggaattatattatccgttctcggaatctgctaaggcaggaggaaaagttatgacaggaaatcgtatcagagacagtaaaagaaatccgttttttcaggtaaaagtaaaagacggaaaatacagcacggaaaatcaggtgagttattatggaaaaaaactaccggatgatacattttcctttgatgtttccaatcagaaagtacaggcgaatctggatgaattcggaacgataagacatattacattttttcacggaaattatctgatggaaagtaagccgggggtgtgggtggcaaaggattttgtgcaggaacatcagttgtctgtttctgtaaaatggaatggacagacagaaaaattatgtgaacatacaaaatatgtggagatggatctggcagaaaatctgtttccacgctgcaggcattattttccgtggggagaagtcacgattcttgccacagcaccgattacagcaaaaggagaacggctgagttgtcttctttatgaagtaacggtaaaaaatacaggcagagaggcggcagagatgacggtctgtctccctgctttgtatgaaaagaaatattcggatacaagaaatgtgttgatgataacagcggagagtggaacgtatcaggatgtttcctttacactgcagccaatggagcagaaacgggtttcacttctgtttggagatccgaaccggtatcaggatatagaaatgtttttaagtaaagatacggatttctggatggaacagacgttacagtatttccggtcattgacaggagaactgaagatggaagaagatgcgatggcaggaatgcttttgcagagagcataccagcaggcgtttggtgcgtttgcaatgtcaggcgagaatgaaattctgggttccaactggggaacgtatccggtcacaccacatgtatggaataaagacatgtactactccagtctgccgtttacactgacagagccggaactttgtaaaaaatgtattctctggtttgcaaaatatggaatcaaatataaaggaactaaattcgaaggcggcgtctttcattcattgagcaattcgttgtctgtgatcatgctttccggtgcatattatgagtatttcggtgagaaagaatttttccaacagcatccaaagctctataagaaaatgaaagcaattcttcagacggttctcgaaagccgtgaggaaaatgagccttatctgtatcgtacaacgtggatttccgatgcgtatgcactgggaaagtatcatacaggaaccaatctctgtatgtaccgcagttttatggcattagcaagaattgcggaagaagttttcggagagaaaagttatgcggaaatgttgagaagtgaagcaggaaagacaagaaaagatatcgaacggtatatgactgcgaaggggctctttggaacacagtatctggaaggaatcagtggaatcgcagaggaaaagaaggaatgtgattctgcagaaaagtatcagaaagagatgttggaccaggggcttcagtttataacagatgtgaaccatgacggagaaatttgtctcagaatgcatgatggggaagaatcggatacaaccctgatgaaatactacaaatatcaaagtgaagagcaggatactttgaagcagtatggtcagtttacaggaagcagagaaaatcctacttacagtgaactgagcagaggaatcaagtggggaaatcagtccggggcaacatttccgggatatatttcgattttaaacggtgcggcagagaaagaaagctggtcaggagacgaaggtagatttcgtgagttagaaagactgacagacctggatggttcctggtggtggtggccgtataagatcggagcgcagaccggtgatgttgtgagaatgaacagctgcggaaaatgtggatggggtgcaggaatcttttttatcctttttatcacggaatttctcggaatcgaatacgatgcgccgaaggcggtgttcagaatccatcctaagcggtttatcggcggattctgctggaaaaatatgcggataggaaatgcccgatttgatatttcggttcggtatgagcatcatatggcagagttttctatgaaaaatagaagtacatttccggtttatgtagaaatgaaaaaaaatcagaagaaattaattcccccaaacaacgaagagaaatggagtcaggattatgaatttattaaataatatcacaacctttaagggcgagcggtcaagagcagtatctccggaaaatccgacgggagaaaagggaagagcatgcatggaagacagtgcactcggaccgcagagaaaaggaagaggaagtatccgtcttccaatgggagaagagacggtcattgcagatataaaaggaccgggaatcattcgtcatatctggatgacgattcgtgaaaatacagaaaagggaagttttgttatgcgtgatgttgtactcagaatctattgggacaacagcagcactccggcggtagaagctccactgggagatttcttctgcaacggattcggtgaacgatgtgacattgcgtctctgccgatcgtagtaaatccaacgggcggtatgaacagctattttgaaatgccgtttcgtgagagagcaagaattaccattacaaatgaacatccgaaagacattacttcatttttctatacagtaaattatgcggagacagacagtctgccggaaaacactctgtatttccacgcatactggaaacgggaaagacaaacagaactggcaaaagattacgtgatactggataagattaaaggaaaaggctattatgtaggaacatttcttgcgctgactgcactggaaagatattggtggggagagggtgaatttaagttctatctggatggagatgaagaattcccgacagtatcctccacaggttctgaagactatttcggaggtgcgtgggcatttcatcagaaagatgagctgggaagaccttccgttaagaactattccacactgtttctaggttatccgttttatgagacaaaggacaagacacgtgtacggtttgaaacaggaaaattaaatgcagtacatgcatttggtgatgacagtctgccgcgccatggtctgtaccgctggcatattctggatccaatcgcattttcagaagatatcaaagtaactttgcagcagattggaaatgatgatctgtcattgtttgaacgttcggacgatgtggcaacagtggcttattggtatcaggattctgcagaaggatttgaccgggcatttccggacagaagagcacgtctgccgaggtaagaatgccgggagttactgctcacaggttaacatgtgaacagtaatccccgggacaaaaagccatgagatggaaaagaaaagtgttgtagagaaattcaaaattcattataataggggtacgaaaaagcagaaaacccgggaggtactttttatggaagcaaaagacagggtatatcaggcactgtgcaggatggcgaagagtgattgtcagattacggcggcagcacttgcagaagaactgaatttaagccgacaggtagtcagccattatctgaaccgtcttttggaagaaggctgtgtggaaaagacacttacccggccggtatgctggaatatcaggaaacaacagagagagaacgtgcagggttctgtcagtgaagaaagaaaagaaatagaagaagtgctgccggaagtacgccgggaagatgtctttgatgcaatgatcggtgctgacggcagccagaaaaatgtaattgaaagatgcaaagcggcggtgtcatatccgccggacggactgccgatattgattacaggagaaagtggagtcggaaaaagctttctggcaagactgatccatcaatatgcaatttccagagccgttatcagggaaagtgctccgttggtagtgctgaattgtgcagattatgcgaacaatccagaactattgtcggcagcacttttagggtacaaaaagggaagctttacaggagcggatacagataaagaggggcttttgcaggaagcggacggcggttatctctttctggacgaggttcaccggttgtcttatgaaaaccaggaaaagctttttgttttcatggacacaggaagatatcggccacttggtgacaaaaactggaaagcagcgaaggtaaggtttatttttgcgacgacggaggtacctgaaaaagtccttctggaaacatttcgccggagaattaccgtgcagatttcaatcggaagtattgcagaaaggccgctgatggaacggcttcagttgatttatcggttttatcagaaagaagcagtaaagatcaacaaggatatattgattgaaaaggatgcgatgcagtatctgtgtttttcaaagttacccggaaatatcggaaaactggaaaatcttgtgcaggtaagctgtgcggaagcatattttcggcagcaggagaaggaactgttgaaaatctcttcaagagagctgcagaatgagtcaccggacaaggacgattccttggaagaaattgtctgcccgatgaaagttttgtgcagtcaggaatgtgaatctgcgtatgaagcatgtgtcacggagcataccgtgaatgtttcaacactttgggaagaggtagtgaaggcatcctgggatgagatcgatatgttatatctgcggtataaacatcagatgaagacttgggaaaaatacgtcacagtgagttctttggtgtttgaaaatacggcaaagaagatgtttgaaagcagctgcagattggtgctgaaacgctatggaatccgtgtgacagaccaatgtctgaaggaactgtacctgagttataagatgttttcgcaaatggaattggatgcagagatggagtggaaattgtctgtttattttgaacaggctctttcaagggcacattatattgcaaaacgcctttttgagaaagtggcatcgttggaacaaggctgtggaaagcatgttctgtttttgtttacacttgctttgcatgaatatgttgcagagtgtgttgaactggcaggtctgattgctgcgcacggagataccacggcaagcagtattgcaaaagtggtgaaccaggcatgtgaaacctttgtgtttgaagcaattgatatgccgatggattcttcttttgatgcgacgatcgagaaagtaaagagttatctggaagatatcccggggggaagaggactgattctgctggtagatacaggttctctcagcagaatgtatacattgatcaaaaacagtctgtcaggggatctgatgattatcaataatgtttccacggcaattgcactcgatatcggaattaaaatgctgggacatagttcctttacggaaattacacagagtacaaagaaactctgtagttttgatgtacagttttttgaaggcctttcacaaggaaaaaatattgtcatatcctgtatgtccggagtgggaattgcggagaagattcaggaaatgatgaaaagcgtgttcggagactgtgggcttgattttattacgatggattataaggaactgattcgggctttggatgaaaatgatgaaaaatcctttgagcagacactgttgattttgacgacttcttcactttcagaaggagtaaaaactccatggctgagtatgtatgacgtgttggatggaagtggagaacaggtgctgtgggattctttaaagacagtgatcaatccggagcggtttgaagtgctcaaaagagaatttgtaaagtttttctcaatggaaggtattgtaagccgtctgcagtttttgaaccctgcggttgtagttcaggaagtagaattgattttgatgcggtatgaacagtattatacattggaaatgtcggggtatgtgagactaaatttgtatatgcacattgcatttatgtttgaacgtctgatgatcgcacaggatgattatgaggaagaacaacgggaattatctgagcaagagcaggagttctatcggatttcacggattgtattttcagaagcagaaaaaaaatacagaatcagactggatgaatatgaattgtcgatgctatacgaattgtttaaaagcctgattaagtagcaaagaggaaattcgatgggactggaactgaaggttgagcagaaacaaagggtatatcagaagcagattgagcaggcacgcatcctgcaaatgaatgcacaggaactcgctgtgtgtattcaggaggcagcattggagaatccgttgattgaactggaagaaatgatggatgtgccgatagaagaactggtgaagaaggatgtgcgagaaactgatgaaacagaagcagaggtatcggaggataccgactggagatataccggcgggcatcagtcgccagaagactggtggactccacagggaggaaaatcggaaagtcttgttgatatgatacatcaacagctgctgacgatgtcaattggggaaaaagaaaaggaaattgtggaaaagttggcgggagcgttggacagcagaggatatctggagattccggtgaaaaaactggcaaaatatataccatgttcggtgcaggaacttcggagtgcattagagatacttaaatcattggaaccggcaggaatcggtgcgacagatttgaaggaatgtctgattctgcagttgagacggcagaaagactcccggcttgcggttacattggtcaaaaattatctggaagacttgccgaaacatagaatttcagcaattgcaaaggaactgggagagaacgaggatgcggtaaaagatgcatttgccagaatcaggaccttgaacccaaaaccgggaagtattttcggggaaggaacaacggtgctctatgtgataccagatattattgtgtcggaagaacatggagaatacacagcggcattgaacgaggctgtgtaccggaaactgcggctgaatgaatcctatgtgaagctgaaggattctgaggaatcagaggtaagagaatatattattcaaaaacaggcgcaggcagggtggctgaaaacatgtattgaacagagaagtcatacactgcagagaatcgcagatatattgatagatttccaaaggacatttttagagacgggaaaggatatgaaaccgctcagacagaaggacgttgcacagatcatggaagtgcatgaatcgacggtcagcagggctgtaaaaggaaaatatctacagtgtggcagaggtgtatacgcactgtcggattttatgccgaaaggaatggaagaagtcagcagtgattctgtaaagcagatgctgaagaaaatcattcaaaatgaagataagaaaaaaccactgagtgatcagaaactggtaaagaaactggaagaagagggtgtacaaatatcaagaagaacagtggcaaaatacaggatgcagatggaaattccagatgcatccggcagaaaagcagagtgagctgcgaatcagagctgttggctgaactgataccattttttaggagttgtgacattagggtatgacttcttaaaaaatattaatagcaattcaatggttaaattgtatagaaataaaaacaattttaatgtttgtaaaaaaaatattgtgaaaatgttaacaataattacgtctgtggattgttttttatgcaaaacataagattgtcatttataaattaatacgctataatatagaagaattctaaataaataattcctgatgattttcacgggtgtcaggatctttaagaattggaggaaagaaatatgttagtatcagctacagaaatgcttcagaaagcaaaagcaggccactatgcagtaggacagttcaacatcaacaatcttgagtggacaaaggctattcttacaacagcacaggaactcaactcaccagttatccttggtgtatctgagggtgcaggaaagtacatgacaggatataagactgttgtaggtatggtaaacggaatgatggaagaactcggaatcacagttccggttgctcttcatcttgaccacggcagctacgaaggatgcctgaaatgtgtagaagcaggattctcatcaatcatgtttgacggatctcattatccaatcgacgagaacgttgagaagacaaaagaactcgttaagatcgctcacgagcacggaatgtcaatcgaagcagaagttggatccatcggtggagaagaagatggagttatcggaagaggtgagtgcgctgatccggaagagtgtaagagagtagctgatctgggaatcgatttcctggcagcaggtatcggtaacattcatggtaaatatccggcaaactgggaaggattaagttttgagactctggatgctattcagcagcgtacaggagcaatgccactcgtacttcacggtggtacaggtatcccggaagatatgatcaagaaagcaatctctcttggagttgctaagatcaacgttaatacagagtgtcagctttctttcgcagatgctacacgtaagtacatcgaagcaggaaaagatcttgagggtaaaggatttgacccacgtaaacttctcaaaccaggtgcagacgcaatcatggaaacagtaaaagagaagatggagttattcggatctgtcggaaaagcctgagaagaacttttttaaaaaagcacttgcgttttaaagcaagttgaggtatactgactcacgtagacagaacaagggcgttccaattataattggagtgccctttttttatcgcttgggaaatgatccgcatgattgaatcagattggatggaataaaatcagatctgatctgactggatcagacggatgatttcctgagaggtgatctatcaaaagggttcccgtagtgaaatcgagttattgctcattgcagtgggcggtaatcggaggattaagagaaaaggaaggtataggatatgagcacagaattattcaatgtagctgacatctttggagagaacgtatttaacgatactgttatgcaggagcgtctgccaaagaaagtttacaagaatctgagaaagacaattgaagaaggaaaagacctggatctcgagacagcagatgttattgctcacgagatgaaagaatgggcaattgaaaaaggagcgactcactatacacattggttcctgccacttacaggagttacagcagagaagcatgattcctttatctcagctccgcttccaagtggaaaagttctgatgactttctcaggaaaggaattgatcaaaggtgagccggatgcatcttcattcccgtcaggaggactgagagcaacattcgaggcaagaggatatacagcatgggattgtacatcaccggcattcgtaagacaggatgcaggcggagctacactttgtatcccaacagcattctgctcctatacaggagaggcactggatcagaagacaccgttgcttcgttctatggaagctatcaataaagaagcattaagacttcttcgtttatttggaaatacaacatctaagaaggttactccatctgttggagcagagcaggagtacttccttgtagatgcagagaagtttgaagaaagaaaagacctgatctacacaggacgtacactttttggagcaatgcctccgaaaggacaggagcttgacgatcattacttcggaacaatccgtcagagaatcgcatctttcatgagagatgtaaatatccagctttggaaggtgggtgttccatcaaagacacagcataacgaggttgcaccggcacagcatgagctggctccgatttatacagaagctaatatcgctgtagatcagaatcagctgacaatgcagacattgaagagagtagcttgtcagcatgggctgaaatgtctgcttcacgagaaaccgttcgcaggagttaacggatccggtaagcacaacaactggtctattactacagatgatggaatcaatcttctcgaaccaggtaagacacctcatgagaatacacagttccttcttgtacttgcctgcattatgaaagcggttaatgtacatgcagatctgctcagagaatctgcagctgatccgggaaatgatcacagacttggagcaaatgaggcacctccggcaattatctctatcttccttggagagcagcttgaggatgttgttgagcagctgatcagcacaggagaagctacacacagtttaaaaggtggaaagctggaaacaggtgtaagtacacttcctgacctgttcaaagatgcaacagacagaaacagaacatcaccgtttgcatttacaggaaataagttcgagttccgtatggttggatcaagagattctatcgcaaacccgaatatcgtactgaacacaatcgttgcagaagcatttgcagatgcatgtgatattcttgagaaggcagatgactttgatcttgcagtacatgatctgatcaaagaatacctgacagagaaccagagaatcatcttcaacggaaacggatactctgacgagtgggttgcagaggctgagagaagaggacttccgaacattaagtctatggttgaagcaattccggcaatcacaacagacaaggctgtagaattgtttgagagattcagcgtatttacaaaagcagagcttgagtctcgtgcagagatccagtatgaggcatatgctaaggcaatcaatattgaagcccgtactatgatcgatatggcaagcaaacagttcctgccggcatttatcaagtatacaaagacacttgcagatacagtaaatgctgtaaaggcagctggtgttgacacatctgttcagacagagactctgaaagaagtaagtgctctgatggctgagacaaaggcagcacttgataaccttgtaaaaacaacagcagatgcagcagcaaaagaagaaggcgaagtacaggctacatactatcatacagaggttgttccggctatggatgcactccgtgcaccggttgacaaacttgagatgatcgtggataaagaagcttggccaatgccatcttacggagacctgatcttcgaggtataaaattgcattacagaaaagtaatttgaagtaaatgattggaagtcattattcggataaagagtctggataatggcttctttttgctttgaaaatcgggaaagctgcatgactatttcatgcaagaaagcaaaaattattgtataatgagaagtggttcgtgcagcttgagcgtattctgcacgaatgagaaaaagaaagagtggaataaaaatgcagtcagaagcagaacttagaagtttattatcaagaatagatcaccggggatatccggcttataaagatacaaaaggacagtaccgatttccgggatatgttttatcaatcgatcacgtacagggagatccgtttgcgtcaccgtcaaaggtaagtgtactggtgagtgggaagacagcaggattcccacaggaattatattgtggaaaatgtcagagaatcgcacttcaggatgaattgctgcgccagtttggaagaagggcagagaggtttgcattcaaggcgaaaggttcaggtaagagcggactgatctctgtcagcagatgcggacaggaagttttggagagaacagcgtgtcagatccagccggagaacggaaacatccttctgagaatggaaatcggatttccggcaaatggacgaacgatcaatgcaagagaattagagaagattttatttgattttgttccggagtgtgtaaaggcatccttgttttataagaatctggatgcaaaaagattgagaagaatcgtagatctggcagaagatcaggagtatatccgtaaagaacttccgaaacgtggtttgtgtgttttcgtggcaaacggaagtgtactgccaagggaatccggaatttcatccaggccgatgcgtgacggaattgccttccagtctccgacggagcaggaagtgacactggaacttccacataaaggaaagattaccggtatgggaatccgtaaggggattactttgatcgtcggtggaggttatcacggaaagtcaacacttttgaaagctctggagcttggagtgtacaatcacatcgcaggggatggaagagagtatgtgatcacagatgcgacagcagtgaaattgcgcgcggaggatggaagaagtatccagaagacagatatttccatgttcatcaacgatcttccgaacggaaaagatacgacatcattctgtacagaagatgcaagtggaagtacttcacaggcggcaaatgtgatcgaaggaattgaggccggaacatccctgttcttgattgatgaagatacgagtgcaacgaacttcatgatccgtgatgagctgatgcaacgtgtgatccacagagagatggaaccgatcacaccatttattgaaagaatcagggaattgtatgaaaattatgggatctcgacagtgatcgttgcaggaagttcgggagcttatttccatattgcggatagtattattcagatggatcgttatgttccgaaagacattacagtactggcgaaaaaagaagcagagaatttcccacagatcagcgtgccggagcagccggcagagaaaccgacttatgacagagtgccgcgaccggataaagcatttcgcggaaatgaccggatcaagatgaagacgatgggaaaagaatcagtgatgatcaacagggatacgatcgatctgagatacttagagcagattgcggatagcgaacaggtgacagcactgggatactgtgtacgatatgcacagaaacatttgattgacggaaagaagaatctgatccagattgtagatgagttggaagaagtgatgcagaataaaactttggcggaattatgcgagagtacatccagtgtatcctgtatggcagtgccgagaagacaggaaatatttgcatgttttgacagatatagagcacttaggttagtatgacataggagttgataatatgaaattagagaatggaagaccagaaaacacagaaggaagattagaaaaggaagtcagggtatatgattttctcgataagcttggtgtagaataccagagagtagaccatgaggctgcgatgacaatggaagcctgtgaagagatcgacagaacacttggagatggaactgcaatctgcaagaacttgttcctttgcaatcgacaggaaacagacttttatctgcttttgatgccgggtgacaagccattcaagacaaagaatctgtcggcacagataggttctgccagactttcctttgcaaagccggagtatatggagaagtatctggacattacaccgggatctgtcagcgttatgggacttatgaatgatacagaggggaaagtacagcttctgatcgatgaggatgtaatgaaagatccgtattttggctgtcatccgtgtatcaatacatccagtctgaagattcgtacatcagatttgatcgcaaagatcattccggcgctgaagcatgcgccgaagatggtgaaacttccgggagcggaggagcaacagtagtaatgaaaatgtgattaatcgacaccaggtccatttcctgttggttgtatatttttcgtgcatttgctataatttatatgttgatatgcgaatagcaggtatcattttcaggattgatgcagagaagataaaaaggaggactagcgtgtctgaggaaaataaagtgatagatgaagtgaatacatcaggagtagtcgagcagccggtggatgcggaggagattccgccagtgaagacagaggcgataccaccggtgaatacggaaccaacacatcctgtacagccaccggtagaaccggcgcagaaactggaagattattacaaagagacggcggaggatcgtgtagccgaggaagagtatgagcaggcggttaaagatccgcagaaccggaaggaaaagatcgatcagatcaagagtattttccaccgcagtggggagaagaagttttccagagaagaagtgattctttctaagatccggccggaagatatgctggaatatctgacgttggaacagcgcagactggaatgcttacagaaagcaagacagagccggaatgagaagcttctcaaggtgcttcagcttgcggcgatacttgcagcaattgtagcagttgtcgctttactgaaggataatccggtcgttcttgtgaacattctgtatatgcttggtattgtagcagcaatctggatctggaagaatccgggaaagaagtaaatttactgtaatgaggtgacgatatgaaattttttcatttatcagacctgcatataggaaagcaattacatcactataacctccgggaggatcaggaacatatccttgcggaggttctttcatatgcagcgtccatacatccggatgcaatagttatcgcaggagacatttatgataaatccgtgccgtcggcagaagcagtcagcttgtttgatgaattcttgacagctctggctaagattgaaccggtgattccggttcttattatatcgggaaatcatgattcggcacagcggcttgattatgccagtcgtttgcttggaagccatcagatttatattgcgggtcaggctccggaggaagaagaggatggtctgaaaaagattactttgacagatgagtttggtgaaacggatttctggctgcttccatttttgaagccgggatatgtgcgcaagatctttggcggagaggcgccggagagttatacggcagctgtacaaggaattctggagagggagaagattgatttttccagaagaaatgtactggtttcccatcagttttatacaggaaaaggagagtctccggtaacctgtgattcggaagtattatctgttggaggcattgataatgtagatatttccgcagtgcaggagtttgactatgtggcacttggacatttacatggtgcacagagagtcggacaggagaagatccgctattgtggaacgttgctgaagtattctgtcagtgaggcaagccagaagaagacacttcatgtagttgaactgaaagaaaaagggagcgagccggagattcagaagctgccgctgcatccacttcgtgatgtgagaaaactcaggggaactctggaagagattcttgaagcggaggatggaaccgggagtgaagattatgtcagtgtgacgctgacagatgaggttgatccgtacaaaccaaaggaacagctggaaagaaaattccatcatattctagaagtgcggatggataatgagagaacaagacagaagctggaattttctgaagaacagatacggatcggtactccgtttgaaacattttgtgatttctacaaagagatgcaggggcaggaaatgtctgagcaggaacaaaagatcttaagagagattctaagtgaaatgaagggggaagacgtatgagaccggtgagattgacgatgtccgcattcggatcttatgcgggcgtccaggagatagattttacaaagattcacagcggattatttctgattaccggagatacgggtgcaggaaaaacgaccatctttgatgcaatcatgtatgcgctgtatgaccggacgagtggcggacgcagagatggaaatatgatgcgcagccagtatgcatcagaagacacagacacgtatgttgaatatgtgttttcttatcggggacaggaatataccgtgcgccgtaatccggaatatctccgggtagggaagagaagaaaagcagatggaagcctccggtatgtgaaagagacagcgaaggtaagtctccttcttccggacggaagggaatatcaggggaagaagcgagagacagaccagaagattcaggaaatcattggtcttgatgcgggacagtttacacagattgccatgattgcgcagggagatttcttaaagcttcttcatgcagaatcaaaagaacgaaaaaagatattctcgcagatttttcagacacaaatctactggcggattcaggaagcactgaaagaaaaaggaaaagatctgtatattgcgctgaaggaaagtgaatcagacatccggcgtgagatggagcgtgtggaaccggaggacacagatcagcatgatctggcagaccagtggaaagaactctgtgagttatccatgccggaagtggaaaaggttctggaggctgtgaaaaactttctcgaatacgaagaaaattgtggaaaagtcttaaagaaagaatcggaggaacttaagaaacagtcagaaacacttcgaatgctgattcagaagaaagaagagaagaataagatatttgatcgtttggaaatggaagagaaacagctgagtattctgaatgcaaaacaggaagagatggaaacctgtcgggttcaggcagtgcttggacaccgggcagagcaggcgagacatctggaagtgcaggctcttcgaacagcgaaatccgtgcggcagatacggggcgagatcgagcagatcactgtatggcagaaggaacaggaaaaggaactttctgaggttaaagaaaaagcggaagaattggaagaagtttttgcaaaggaagaaccggaaatgctgaaaagaatttcacagttatcggatcttcttccacattacgcaaatgtgcgtaagtatttgaaagaatatgaaaatcagacaggggcaatgcagcgatgtatacagaattgtcaggaagcatcagctcagtatgaggaagcatatgcgaaattctttcaggagcaggcgggaatcctggcaaaggaattacaggaaggtattccatgtccggtctgcggatcagtagaacatccgcatccggcaaagatttccggagaagcaccggataaagagacggtagagaaactgaagcaaagacgtgatctgctggaacaaaaaagaatacagcagcaggaaaagtttcagatatgtaaagcacagcttgaatcagaacaacgtattctcggagataatcctgtgaaagaagagcaggtgaaagaagagcttcagaagatgcaggttgaactggatcggaagaagaatgaaacaaagcaggcacaggaacagtgccgtaagatgacggaggaaagcagacgtcaggcaggaaaactggagggacttcgaggccagaaggcagaacttgagaagcgttttgtaaaagagcaggaagagttccgagaggagatcagccgacaggaatttacttcacaggaagaattccgtgaggcgaaacagtggatcgaagggtggcgggagaaagacaaagaagtgaaagaacatgaccgccagctgttagagaaaaaggcaaagatcgagacactgaaggaacagactgcaggcgaaaagcgggaagatccgcagcaggagatagaaaagcgaaatgaagtagaacatctgttgaaagaaaaacaggatcatcagatgcagcttcacagcaggtggacaggtaaccagaatgcgtacaagaatctgaaacaatatttttcttcgcaggaagctttgcgaaaagaatatgaggtactttccaacctgagcaagactgcaaatggcaatttgagcggcagtgtgaaacttgattttgagacgtatgtacagcggacttatttccggcagatcattcaggcggcaaaccgcaggctggcgcggatgacatcaaatgaatttattttacagtgcagggagattcaggatctgagcagtcagggacaggccggacttgatctggatgtctatgatctggtgacagattctgtcagagatgtaaagtctctctcaggaggagaatccttcatggcagctttgtcgatggcattgggacttgcagatattatccagaatacggcgggagctgtaagtctggagacgatgtttgtagatgaaggattcggatctctggatgatgcatcaagagaccgtgcaattcagattctcaaagaacttgcaggagagaaaggactggttggaatcatttcccatgtaaatgaattgaaagagcagattgactggaaattaaatattataaagacggagcatggaagtcaggcaaaatgggaaatctaaaagcataaggcaataatagggacagctacgaagaaggacagaatacaggcaggtgcggaaaatgaaacaaaatggaatgagagaaagaaaaggaaggatttcaagatacggaagaaggatgttggcagttctgctcagcgcagggatgctgctgacagagactcttccggtattcggaacagaaaatacggaggaaacggcacgcccacatcagctttattgcacagtacttggagacagtattgcgaaaggttacacttgcgataaatcctggatggagaattatggaagtctggcagcaaaggaaatagcatatagcgaagggtgcagatatatttatcacaattatgcaagaacaggtcttgatacagcaggattgaacgaaaagtatttatcaaagcaggatgtgcagacgaatctttcaaaagcagatgttatttttataacaattggttcgaatgacctgctcaacgaatgtaagcgtgtggttcaggaaatcctgaagacagatacaaaatttaaaagtgcggatgaggcacttgcatctttgaaagagtctgtaaagaagaatccgctgcttgtgctgagtgcgatcaacgcgttgaacaactgggattataattcctttgaaaaagaatggatccagatgatgaagacagtcaattcattgaaaaaggacgatgcaaaagtgatcgtgactacaatttataatccggcaggaaatatgaagcttccatctacgctgaataaaattgtagaagacattattgaaaatatgaacgcaatcattgaaaaacgtgcgggaaaatacgattatgaagttgcggatgtgtatcagtcatctgtgatatctcatctgcagaaagacggagtacatccggattctcaggggcagcagatcattgcagatctggtttgtaaggaatacgaaaagtaaaaaagaagcattctttgtgttggttcttatatggaacaatgcagagagtgctttgttctttttgtaagaaatagaactgtcacatttataacacaaaacattcacagaatcctgatacttttgaaaggtcaaaaatctcggtttgtctgcatagatatagactggaagaaatatagggaggtaagactttgatagaagtaaagaatcttgtgaagaagtatggaaatcatacagcagtagatcatttgaacttcacaatagaggaagggcatgtctacggctttcttggaccgaatggggcgggaaaatcaacaacgatgaatattatgacaggatacctcggtgctaccgaaggagaagtactgattaatggacatgatattctgaaagaacctgaggaggcgaaaaagcagattggttatctgccggaattgccaccgttatatatggagatgacagtccgtgaatatctggaatttgtagcggagttgaaaggaatcgctaagaataaaagagaagagtctatcaatgaagtagagaagatggtgaagatctgggaagtggaaaaccgtctgatcaggaatctgtcgaaaggataccgtcagagagtcggactggcacaggcagtgcttggatttccggagattattattcttgatgaaccaagtgtcggacttgatccaaaacagatcatagagatccgtgaactgatccgtcagcttgcgaagaaacatacggtgatcctgagttctcatattctggcggaagtccgtgaagtctgcgattatattttgattatttccaaaggaaaactggtcgcaagtgacacaccggagaacctggaacggaatctgggagattctgatctgattgagatcgagacgaaagcaagcccggacgaagttcgaagaattcttgagacagtagatggaattcgaagtatttctacaaagtatctggaaaatggaatcacatgggctcagattcaggagaagaaaaatacagatgtacgtgagaaagtatttcaggcatttgcacagaatcatcagccactgctgaaactgaatccgctgcaggtaagtcttgaagatgtctttatggaactgacgcagagtgacagggcagcagaagaatatgcagaaaaggcgaagaagaaggaaacggaggacatgaaagatgctggcgatttataaaagagaagtacgctcctattttcagtctatggtgggatgcgtgtttgttgcatttcttattgcatttacaggaatctactttatggcatataacctgacagccggatatccatacttttcctatacgctttcaggtacactgatcgtatttatcgtagggattccgctgatcacgatgcgcagtttttcagaagagcgtaaaaataagacggatcagctgcttctgacagctccggtcagtctgtggaaggttgtgcttggaaaatatcttgcaatggtaacggtaattggaatcccgaatgtgatcttctgtgcgttcccattaatcattaaggcacagggaactgcatatctgaaagtagattacatatccatcggggtattcttcctgttgggttgtgtatatgcggcaatcggcatgttcctgtctgctctgacagaaagtcagatgatcgcatttatcagtacatttggtattctgcttatcttgtatctttggaatggaattctttccatgcttccaagcagtgcagtcagcggattggtcggtgtgcttattattctgactctgattgttgtttatatttatcagatgacaggaaatatagtgattgccggtgtgatcgaagcagttggtgtgatcgccggtgtggtcgtgtactttgtgaaatcaagtctttatgaaaatctgctgacaaagatgcttggaagactggcacttgcagatgtatttacggatatcacttcgaacagtattgtagatataacaggaatcgcgctgtatctttcactgatcgtagtctttgtgttcctgacagtacaggcaatccagaagagacgttggaattaggagggcatgaaagtggatagaagaaagaaaacaacaggaaagatcaaagggatgttccacacctccggtacaaagcacggatcttacagtgtggggctgacagtacttgtaatcgcgattgttattgtgttcaatctggtgatcggacagattccggaagtttatcgcaatctggatatgagcagtacaaagatttatgaaatttcagatacaacaaaggatctgctgagcggattgaatgataaagtcgatatgaaagttcttgcggtaaagaaagacacggatgacaggattaagacatttatcagtaaatatgcagcactttcagataagatcaatgttgagtggatcgatccggttctgcatccgtcagcattgacagagtataatgcatccgaaaatacaattgttgtatcttgtgaagcaacaggaaagacaacaactatttcttttgacaagattcttgttatggatacgtcttcctattattattcaggaaatgcatcttattcagaatttgacggagatggccagttgacaagtgcggtgaattatgtgacaagtgatgtgcagaagacaatctataaagtaagcggacatggagaggcggaactgtcatctacagttacagacttgatgagtaaaaacaattatacgctgacagaactgaatcttctaatggcagattccattccggatgattgtgatcttctgcttatgaatgcaccgacgaatgacctttcagaaaatgaagtgacacttctgacaaattatctggcagcaggtggaaaagtgatgtgtctgcttggggatacctctctgacggatttcccaaatctggcaagtgtgctgaaggtgtatggaattgaaggtgtagatggttatattgcggatccgacaagatgttatcagaaccagccatattatatcttcccacagctgaatgtatccggtgatcttgcgaacggaatcagttctcagatggtgcttttgacgaatgcacatggaatgacattgacagatccgacacgagatacgataacaacaagtgcattcatggagacatcggaaaatggatacgcagtaacagagtctgaacagaaacagggaacgtatgaacttggagttgtcgcaacagagacaatttcttcgggagatgattcttcttcggatagttcagatgccgaggcaacagatacaacaactgatgatagtgaaagtacggaagattctgaggaaagcagtacaacagaagcccgtctgacggtgatctccgcaggaagtctgatcgatcagaatattacagatgcattttcacagcttgagaatacacagatctttatgaatgcagtaagtgcaaactttgatggagtacagaatctgtccatcgaggcaaagagtcttggaacagagtataatacgatacagcatgccggtctgttcagtcttcttgtaatctttggaatcccggcagtgattcttatcgccggattcagcgtatggttcagaagaagaaaagcttaaggaggaagaaaattagaatgaagaaaaaggaagggtcattgattctgatcggtgttctggtgttgctccttatcctctattttgccttaagcacatggaataagaagcaggattccaaggaagaagaaacggtgaaagtgacagacctgaagacctcagagattaccggggtgaaatatgatcttggtacgggtgaaatgaattttgagaaagacggagatacctggtactataccgcagataaagattttccattgcgtcagagttatccgaagacagtggctgatgccatgggacagttgagtgcggatcgagaacttgaggatgcggatgcgctggaagaatatggattggatcatccgacttatacagttacactgacagatgaagatggaactgtgacaacaatcaaggttgggaatgcgaccggaaatgattactatgcgacagtggacgatacggaaaaggtttatacaattccggcgacttcattggatgatatccagacagaactggatcagattgctcagctggatacttatccaagtatcggaagtggaaatctgaaaaaagaagtgatcacacagaacggtgagacaatcacctatgattccgaaaatgaagatcaggaagaagatgttgcagcagtagccggaggacttggtgctgtgaagctgtcagaggcggcggactattctgtagatgatgtggatcttgcagggtatggtctggatgatacttccagaataacggtagaagtcacttatacaagtgatgctaaagatcagacaatgacactttatatcggtggtgaaaatggaagtggagacagatatgtcatgatgaatgattccaggatcgtgtacctgatctcggatgaaatctgcaaaaatattttgaatcaataaagaatggtaatcgttcagaggaaagtgaaaaattcggtatatttcctccgggcggttaccacattttatatttatttaattgacttttattcgaaaacagcgcagaataaagcacatatcgtttttatagaaaatgcatagcattttggaggttggctctgaacagttagagataatataattggcgagatgcacagcagagaagtaggggcagtaaaaatgtgcatgagcagatttatcaagaaagaaggatttgtatgaaagaaaaatttttacgttttatgcagggcagatatggtgtggatcagttttctaaaggtctgctcattgctggactggtagtagtactcttgtcctcattttttgcagggggaagggcaggatcattattctatttacttggatgggtattgatcatttattgttatttccgtatattttccaaaaatatatctaaacgatatgcggaaaatcagaagtatcttgcaaagacatacaagattaggacttatattcagcagcagaagaacagcctggcgcaaagaaaggcatatcatatttataaatgtccggggtgcaaacagaagattcgtattccgaaggggaaaggaaagattgagatccgatgcccgaagtgtggaacaacatttattaagaagagttgatgtgtttactggagagaaaccatctgttatgataggtagtgagtgttagaatgaatgcgagagaaagaatgagaggacgggaaggatgtcagatccatacagtatattaggtgtagacagaaatgctacggatgaggatgtgaagaaagcttatcgaaagctgagcagacaatatcatccggatgcgaatatcaataatccgaagaaagatgaggctgaggcgaagtttaaggaagtgcagcaggcttatcagcagattatggatgaacgcgaaaaaggatatacttccggatatggttcgagtgatggttcaggttatggaggttacgacccgtttggaggattcggcggttttggttcttatggatatggttcagcaggaagtacgggtagaacttccgggatgagtgaggaagatgcacatctgaatgcggcagctaattacatacgaagcggacattataaagaggctcttaacgtacttgacggaatcagtcagcatagtgcaagatggtatttctacagcgcatcggcgaattccggattaggaaataacgtgaccgcattggaacatgcgagagaagcagttcgtctggagccacagaatatgcagtatcagatgttgcttcaacagctggaaggtggaggaaactggtatcagacaagacagacgatgtacggatatcccggaacctataatagcagctggtgcgtgaaattatgtattgccaatctgatgtgcaatatttgctgtaacggtggcggactgtgcctgggaggcggtccgggcggcggaacatttatgtaagaggaatagaagaggagaaccgagaatgttaacacagttttcgagaacagaactgcttttaggcaaggaagcaatgaataggctggaagatgctcgcgttgcagtatttggtatcggtggtgtcggtggatacgtgtgtgaagctcttgcaagaagcggagttggaaagctggatctgatcgataatgataaagtctgtatgagtaatctgaaccgacagattattgcaacgagaaagacggttggtcaatataaaacagaagtgatgaaggacaggattctcgatattaatccggaggcggaagtgaacattcacaattgtttctttctgccggataatgcagatgaatttccttttgaagaatatgattatgttgtggatgcggtagatacagtgacagctaaaattgctttagttatgaagtgtaaagaattggatataccgatcatcagcagcatgggggcggggaataagcttgatgcaagtgcgtttcgtgtgacggatatttataagactaaggtatgtccacttgcgaaggtaatgcgacgagaattaaagaaacgcggtgttaagaaactgaaagttgtatattcagaagaagagccgatccgtccattggaagatacttcagataattgcaatgtggaggaaacttgtcaggaaaatctggaatacaaggctgcaaaacgcagatccactccgggcagtgtggcatttgtgccatcagtggcagggctgatcattgcaggtgaagtgattaaagatttggcaaaatgtgaatagaacgacaggggaagagagatgagtaagtcaaagaaagaattaagctttgcggaggaagtagagcagagtctgcgcaagaaattcaggaagaatatctggtgtaaatttacaaaggcaatcaatgaatatgaacttgtaaaaccgggagacagaattgctgtctgtatttccggaggaaaagattctatgttgctggcaaagctttttcaagaactgaagcgtcataataagtttgattttgaggtgaagtttcttgtgatggatccggggtacagtccggttaaccgtcaggtgatagaggagaatgcaaagcggctggagattccgatagaggtttttgaatcagatattttcgaatcagtttttaatatagaaaagtcaccatgttatctctgtgcaagaatgcgtcgcggatatctgtatagtcatgcgcagaagatgggatgcaataagattgcattaggacatcattatgatgatgtgatcgagacgatcctcatggggatgctctattcagcgcaggtgcagacgatgatgccgaagctgcatagtacaaattttgaaggaatggaactgatccgaccgctatatatggttcgcgaagaagatatcaaagcatggagagattataatgatctgtattttcttcagtgtgcatgtaagtttacagaagcgtgcgctacaactgagaatgaagagaatctttctaagcgtaaagaaatcaaagaattgatcgctacattgaaaaaagtaaatccatatgtggaagggaatattttcaagagtgttgaaaatgtaaatctggatactgtagttgcgtataagtcaaaaggtgagaagcatcatttccttgacacttacgatgagaagtcggaagaacaaggtgaatgatacggaactgcggatgtaaatgaagaagcagtggatataaaaaatgctaaattgaaaaattaagaaagaggcttgacttctgtttgcccccatgatacaatgtttgggcgaatggaagtaggctttttttttatgcctaaaaattgatggctcgcaaccatcagcaacacgtaggtgaatatattaaaagcgaggtggaagttgtgcgcacaagaattactctggaatgtacggaatgcaagaaccgtaactacaacatgacaaaggataagaagactcatccggaacgcatggaaaccaagaagtactgcagattctgcaaatcacacacactgcacaaagagacaaaataattgttgtcgaaaggaagtggaattatgggtgagaatacaaaaactcagaaaaagagctggttcaaaggacttaaggcagagttcaagaagatcgtttggccagacaagaatacacttgctaaacagaccacggcagttgttgctgtctccgtagtgcttggagcgctgatctcagtagttgatgcgcttttgagatatggaattgactttttagtgaaatagttgatcgcagcagaaaggtgattttatgtcagaggcaaaatggtacgtcgttcatacctattcagggtatgagaacaaagtaaaagcaaacattgacaagacaattgagactcgtcatctggaagaccagattttggaagttcgtgttccacttgaggaagtacctgagatacgtaatggagtggaaaaggtcgtacagagaaagatgtttcctggatatgttatgatccacatgatcatgaatgatgacacttggtatgttgtaagaaacacaagaggtgttacaggattcgtcggacctggatccaagccggtaccgcttgatgagagtgagatggagaaccttggaatcaaacaggatgaggtgatccttgatcttgagatcggtgatgttgtaactgtacttagcggtgcatgggaaggaacagttggagctgttcagacaatcaacgaacagaagaagagtctgacaatcaatgttgagctgtttggccgagaaactccggttgaacttggtttttcagaagtgaagaaaatggattaaaattgcgtgggagggatgagaatcccgccaataccacaaggaggtaattgaaatggcaaaaaaagtagaaggatatatcaaattacagattcctgctggaaaggcaactccggcaccaccggttggtcctgcacttggacagcacggtgtaaacatcgtagaatttacaaaacagttcaatgctagaacagcagatcagggagatcttatcatccctgtagtaatcactgtttacaatgacagaagcttcagcttcatcacaaagacaccaccggcagcagttcttattaagaaagcttgtaagattcagtccggttctggtgtaccgaacaagacaaaagttgctacaatcacaaaagctcaggttagagagattgctgaaatgaagatgccagacctgaacgcagctacagtagaggctgctgagagcatgatcgctggaacatgccgttccatgggtgtagttgtagaagactaatccagattttataacgattatattgtaggatacaatcagccgaccttttccggtgtcctcgggggagagagcgctgagagttcaattgtttagtaaattcataaagtgggaggggcaagttcccgccaataccacaaggaggttattgtaaaatgaaacgaggaaaaaaatatatcgaagctgcaaaactgatcgaaagaggaaatctctatgatcctgcagaagcagtagcattagtaaagaaatcagcaacagcaaagtttgacgagacaatcgaggctcatatcagaacaggttgtgacggacgtcacgctgatcagcagatccgtggtgctgtagttcttccacacggaacaggtaagaaggttcgcatccttgtgttcgctaaggacgctaaggctgaggaagcaaaagcagcaggtgctgacttcgttggaggagacgaactgatcccgaagattcagaacgagggatggcttgacttcgacgttgtagttgctacaccggacatgatgggtgttgttggacgtcttggacgtgtactcggacctaagggacttatgccaaacccgaaggctggtacagtaacaatggacgttacaaaagctatcaacgatatcaaagctggtaagattgagtacagactggacaagacaaacattatccatgttccggttggaaaagcatcctttacagaggagcagttagcggacaacttccagacgcttatcgatgcaattaacaaggttagaccagccgctgttaaaggtcagtacctgaagagtgtaactcttacatctacaatgggacctggcgtaaaggttaacccggttaagcttgcataataaaatgtaaaagagacagttgcgagactgtcatagaggagggtctgctttcggcggatcctcttttgaaaaagaaaaaaagaaaaagatgaaaaataggcttgacatatggaaaataacatggtattatagcctagcaactgccgaagacagtaggtgctgaaaaagcgtaagttatgaacgcctaccgaggaagaatgaatttttacatgcgtatgaatttgtagaacctccacgtctttggacctggagatttttttagtttcagcagagtgatctgctgggaactttggcagtacacgaataatataaggaggtgtaccgaaaagtggcaaaggttgaagtaaaacagccaatcgttgacaagattgcagaagagattaaagacgctcagtcagtagttctcgttgactaccgtggacttacagttgctcaggatacagagcttcgtaaacagcttagagaagctggtgtgatctacaaagtttacaagaacacaatgatgaagagagctttcgagggtactgaatttgcagcccttgatgactgcctggaaggaccaagcgctattgctatttctaaagatgacgcaacagcaccggcaagaatcctttacaaatttgcacaggatgctccggcacttgaacttaagggtggtgtagttgaaggaacagcatatgatgtagcaggtatttctgaacttgctaagatcccttcaagagacgaactgctttccaagttgcttggaagcttacagtcacctatcacaaactttgctcgtgttatcaaacagatcgcagagcagggtggagaagcggctccagcagaagcagcagaggagacagcaacagacgcagagtaatatgcgtcagctgatctggatacagacagcatatatgagcagatgctcatctaattaattaagaatgaaaagaaaaatggaggatatttaaaatggctaaattgacaacagctgaaatgatcgaagcgatcaaagagttatcagtattagagttaaacgagcttgttaaagcttgtgaagaagagttcggcgtatctgcagcagcaggcgttgtagttgcagcagcagctgagggtgcaggagcagcagagaaagatgagttcgacgtagagcttacatccgctggagcatctaaagtaaaagttatcaaggctgttcgtgagatcacaggtcttggacttaaagaagctaaagagcttgtagacggagctccgaaggtagttaaagaggcagtttctaaagcagaggctgaggaaatcaaaactaaacttgaagagcagggagcagaggttactcttaaataattttcctgaatataagtttattccgaccgcagaagatgatatgcttctgcggtctttttgcgaaagaggcgttagaaatggatgcagttgagttgacgagagagctgattaagatagaaagtacggatccaggaagctgggaaaccgagattggtgaatatatctgcgactatttgaaagagagtggagcagatacagaggcttacgaagtagagccgggaagaaaaattgtaaaaggtgttgtgaaaggtgcgaaagcgcatccggcactggtatttatctgtcacatggatacggttgttaagggcgaaggatggacaaagaatgcattcggcgcagaagtttcagatgagaaaatctggggacgaggagcttgtgatatgaagtcaggacttgcaagtgcgttgacagcatttgcggaggtggcaaaatcacagaaagagaatgctgaggatatagaaaaacttccgggaacattagtctttatcggaactgtagacgaggaagcagatatgaaagggtcagaagcagcagtgcaacaaggatggattcagaaggaagactgggttcttgatatggaaccgacttccggaatgattcagatggctcacaaagggagaacctggtttgaacttaatgtggaaggtattactgcacatgcgagtatgccggagaagggcgcagatgcaatcgccggaatcgcatttatgatcgcagagatccgaaaagcgatgggagaagtgccgacacatgaagaacttggaaagtctacggttacatttggacagatttccggaggatacagtccatatgtagtatcagatcacagcatggtgacgatagatatgcgtcttgttccgccgatgaatacacaagaggcagaaaagattgttcgaaaagcaattgaaattggggaaaatgcagttccgggtgtaaagggttcttataagattacaggtgacagaccaccggtggagacacacatggagtcaggtcttaggaaagctttatctgaatcagtgaaaaaagttactggaaaagatccggttgtgtcagcgttcacgggttatacagacacagcagttgtggcaggccttttgggaaatccgaattgtatgtcttatgggccgggaaatcttgcacaggctcataaaccggatgagtatgttgaaattgcggatattgagcggtgcgttcaggtttatcgtgaactgatctgtctttatgaagatatgatatagaagtaatttctgaaaaaaagatactgttcaaaaggaaaaagcttagaatagcggaagatataacatatcttgagaaaaaagtcaagaaaaatataaaaaaatacaagaatcatgttgacaataaaaagagctttgtgatatagtagaaaatgcgctattgtggaaaggtatgccatatagtgacagagaatactgtcgcaaggctcttttcatttttatataactggaactcgtaaaaggcagtttattgcctgcaaaaacaataaatgaggagtgaaacgtcaatggagaaaaacagaattcgtcccatcaaaaccggaaaaagcttccgcatgagctattccaggcagcaagaagtattggagatgcctaacctcattgaagttcagaaagattcctatcagtggtttcttgacaaaggactgaaagaggtattcgatgatatttccccgatcgcagattacaatggtcatctgagtctggaatttgtggattttacactctgcgaggaagatgcaaaatatacgattgatgagtgtaaagaacgtgatgcaacttatgcagcacctctgaaagtcagagtaaggctttataataaggaaactgatgagattaacgagcatgagatctttatgggagatcttccgctgatgacaaagacaggtacttttgttatcaatggtgctgagcgtgttatcgtcagccagcttgtgcgttccccgggtatttattatggaatcgcacatgataagttcggtaagaagctttattcagcaactgttatcccgaaccgtggagcatggctggaatatgagactgactccaatgacgttttctatgtacgtgtagaccgtacaagaaaagtgccgatcacagttctgatccgtgcacttggagtaggtacaaatgcagagatcattgaactctttggtgaagagccaaaacttcttgcaagttttggaaaagatacttctgagaactaccaggaaggtctgttagagctctataagaagatccgtccgggcgaaccgctggcagtagacagtgcagaaagcctgattacaagcatgttctttgatccaagacgttatgatcttgccaaagttggacgttataagtttaataagaagcttcttcttaagaaccgtgtatcaggacaaatcctcgctgaggatgctgtaagtgcgatcacaggtgaagttgttgctgaaaagggaacaaagattactcgtgagatcgctgatatgatccagaatgcggcagtaccgtacatctgggtagagggtgaagagacttccagaaatatcaaggttctttccaatatgatggttgacctccaggctgttgttgatattgatccggccgaggttggcgtgacagagcaggtatattatccggttcttgcaggaatcattgaagaatctgcaggtgatgtagatgagatgaagagactgattaagagagatcttcatgatctgattccgaagcacatcacaaaagaagatatttttgcatctatcaactacaacatgcatcttgagtatggcatgggaaatgatgatgatatcgaccatctgggtaacagacgtatccgtgcggttggagaacttcttcagaatcagtacagaatcggtctgtccagactggaaagagttgttcgtgagagaatgacaacacaggatcaggatggtatttcaccacagtccctgatcaacattaagcctgtaacagcagcagtgaaggaattcttcggatcttcccagctgtcacagttcatggatcagaacaacccacttggagagctgacacataagagacgtctctccgcacttggtcctggaggtctgtcaagagaccgtgcaggattcgaggtccgcgacgttcactattctcactatggaagaatgtgtcctatcgagactcctgaaggtcctaacatcggtctgatcaactccctcgcatgttatgcgagaatcaacgagtatggatttatcgaagcaccataccgtaaagttgacaagacagatccgatgaacccggttgttacagatgaagttgtatatatgactgctgatgaagaggataattaccatgtagcacaggcgaatacacctcttgatgaagaaggtcatttcattaataagaacgtatccggtcgttaccgtgaggaaacacaggactacgaaagaaataaattcgattacatggacgtatcacctaagatggtgttctccgtggctacagcgttgattccgttccttcagaacgatgatgccaaccgtgcgctgatgggatctaacatgcagcgtcaggcagtaccgcttcttacaacagaagctccggtagtcggaacaggtatggaagttaagacagctgttgactccggtgtggctgaagttgcagagcaggctggtgtggttgaaagctctacatctacaagcatcacgatcagacatgatgacggaacaaagaaaacatataaactgacaaaattccagagaagtaaccagagcaactgctacaaccagagaccaattgttgacaaaggtgaacgcgttgaggcaggacaggttatcgctgatggaccgtctacatccggtggagagatggctcttggtaagaacccactgatcggattcatgacatgggaaggttacaactacgaggatgctgttctcttaagtgagagactggttcaggatgatgtctacacatctgttcatattgaagaatatgaagcagaagcaagagatacaaagctcggaccagaagagatcacaagagacatcccaggtgttggtgatgatgcactgaaagatctggatgagagaggaatcatccgtatcggtgctgaggttcgtgccggagatatccttgtcggaaaagtaactccaaagggagagacagagctgactgctgaagagagactgcttcgtgcaatcttcggtgagaaagcacgtgaggtaagagatacatctctgaaagtacctcatggagaatatggtatcgtagtagatgccaaagtgtttacaagagaaaacggagatgagctgtcacctggagtaaatcaggcagttcgtatttacatcgctcagaagagaaagatctccgttggtgataagatggccggacgacatggaaacaagggtgttgtttcccgtgtacttccagtagaagatatgccattccttccgaatggacgtcctctggatatcgtgctgaacccactgggtgtgccttctcgtatgaacatcggacaggtgcttgagattcatctgagtcttgcagcaaaagcacttggattcaacgtatcaactcctgtattcgcaggtgcgaacgagaacgatatcatggatacactggatctggcaaatgattatgtaaaccttgagtgggatgagttcgagaagaagcatggcgaagagcttcgtccggaagttctccagttcctgtctgagaacagagatcacagagaactctggaagggtgttccgctgtcaagagacggtaaagttcgtcttcgtgacggacgtacaggagagtacttcgacagcccggtaacaatcggacacatgcattatctgaaactgcatcatctggtagacgacaagatccatgctcgttctactggtccttactctctcgtaacacagcagccgctgggtggaaaagctcagttcggtggacagcgtttcggagagatggaggtatgggccctggaggcttatggtgcatcttatacactgcaggagatcctgacagtgaagtctgacgacgttgtaggacgtgtgaagacatatgaggcaattattaagggagagaatattcctgaaccaggagttcctgagtcatttaaggttcttcttaaagagctccagtcacttgctctggatgtccgtgtactgcgtgatgacaatacagaggttaagatcatggagagcgttgattacggtgagacagacctgcgtcatatcatcgaaggagacagaaagtatcgtgatgagaatgaatctttcggagagcatggattcacagagaaggagtttgtcggagaagaactggaagatgttgaaccggacgaagagccggacgacagcgatcttgagaacttaagttttgatgatgatgattacctgggtgaggaataataaggaggagccgtttttatgccaaataacaatgaacaacaatatgaaccgttaacatttgatgcgattaagatcggcctggcttcacctgaaaaaatcctggagtggtccagaggtgaggtaacaaagccggagaccatcaactacaggactttgaagccggagaaggacggacttttctgtgagagaatcttcggaccaagcaaagactgggagtgtcactgcggtaaatacaaaaagatccgttataagggggttgtatgtgatcgctgtggtgttgaggttacaaaggccagtgttcgtcgtgagcgtatgggacacatcgctctggcagcaccggtatcccatatctggtacttcaaaggaattccgagccgtatgggtctgatccttgacatttctccaagaacactggagagagtactttactttgcttcttacatcgtgcttgataagggagagacagatctctcttacaagcagattctttcagaggcagagtatcaggaagcaaaggaaaaatggggaagacatgcattccgtgtaggtatgggtgctgaatccatcaaagagcttcttgagtctattgaccttgagaaagaatatgcagaacttcaggcaggcctggagaatgcaacaggacagaagcgtgcgagaattgtaaaacgtctggaagttgtagaagcattccgcgagtccggaaacagaccggagtggatgatccttacagctatcccggttatcccgccggatctgcgtcctatggtacagctggatggaggacgttttgcaacatctgacctgaatgatctgtacagaagaatcattaacagaaataaccgtctgagaagactccttgaactgggagcaccagatattatcgtaagaaacgagaagcgtatgcttcaggaagctgttgatgcgctgatcgataacggacgtcgtggacgtccggtaacaggacctggaaacagagcactcaagtctctgtctgacatgctgaaaggtaagtccggacgtttccgtcagaacctgcttggaaaacgtgttgactattcaggacgttctgttatcgtcgttggaccagaactgaagatctatcagtgtggtctgccgaaagagatggcaatcgagctgttcaagccattcgttatgaaagagcttgtagcgaacggaacagcacacaatatcaaaaatgcaaagaaaatggtcgagagacttcagccagaggtatgggatgtgcttgaagaagtaatcaaagagcatccggttatgctgaaccgtgcccctactctgcatagacttggtatccaggcattcgagccaatccttgtagaaggtaaggcaatcaagcttcatccactggtatgtacagcttacaatgccgatttcgatggagaccagatggctgtccatgtaccgctgtcacaggaagcacaggcagagtgccgtttccttcttctttcaccaaacaacttgctgaaaccatctgatggtggtccggtagccgttccttcacaggatatggtacttggtatttactatctgactcagcttcgtcctggtgcaaagggagagggcatgttctttaagagcgtgaacgaggctattcttgcatacgagaatggatatatcacacttcactcacagattaaagtacgtgtgacaaagactcttgcaaatggagaagagaagacaggaactatcgatgcaacacttggtcgtcttctgtttaatgagatcattccacaggatcttggttttgtagaccgtgaggttgagggaaatgaacttaagatggaaattgacttccatgttggtaagaaacagctgaagcagatccttgagaaagttatcaacactcatggagctacacagacagcagaagttcttgatgatgttaaggcaatcggatacaagttctctacaagagcagctatgacagtatccatttccgatatgactgtaccaccgcagaaaccgcagatgatgcaggaagcacaggatacagtagacaagatcacaaagaactataaacgtggtcttatcacagaggaagagcgttacaaagaagttgttgagacatggaaagcaactgatgataaactgacagaggcactgctgacaggtcttgataaatacaataacatcttcatgatggcagattccggagcccgtggatctgacaagcagattaaacagcttgcaggtatgcgtggacttatggctgatacaacaggtcgtacgatcgagttgcctatcaagtcaaacttccgtgaaggtcttgacgtactggaatacttcatgtctgcccatggagctcgaaaaggaatggccgatacagctcttcgtacagccgattccggttacctgacaagacgtcttgtagacgtatctcaggagcttatcattcacgatgcagattgtgcaaaaccgggtcagccgattccgggaatgtatgtatctgcattcatggatggaaatgaagagattgagagccttcaggatcgtatcacaggaagatttgctgctgaggatcttaaagataaagacggaaacgtccttgtaaaagcaaaccatatgattacacctcgtcgtgcagagcgcgtgatgaagaaaggtgttgacgagaacggaaatcctcttgagcaggttaagatccgtacaattcttacatgtaaatgtaagaacggtgtatgctccaaatgttatggtgcgaacatggcaacaggtgaggcagttcaggttggtgaggcagtcggaatcatggccgctcagtcaatcggagaaccaggtacacagcttactatgcgtacattccataatggtggagttgccggtgacgatatcacacagggtcttcctcgtgtcgaggagcttttcgaggcaagaagacctaagggacttgccatcatcacagagatcgcaggacgtgcaacactcagtgatacaaagaagaaacgtgaggttatcgttacaaacgaagagacaggagaatccaaatcctaccttattccttacggatcacgtatcaaagtacaggacggcgttatgcttgaagccggagatgagcttacagaaggtagcgtaaatccacatgatatcctgaaaatcaaaggacttcgtgcaacacaggattatatgctccaggaagtacagcgtgtataccgtctccagggtgttgagatcaacgataagcatatcgaggttatcgttcgtcagatgctgaagaagatcagaatcgaagagaagggtgatacagagttcctgcctggaacaatggtagacgttcttgagttcgaagaagtaaacgagcagcttgttgcagaaggaaaagagccggctaccggagagcagatcatgcttggtatcacaaaggcttctctggcaacagaatccttcctgtcagccgcttccttccaggagacaacaaaggttctgacagaagcagctatcaagggtaaagttgaccatctggttggtttgaaagagaacgttatcatcggtaaacatattcctgccggaacaggtatgaagaagtaccgtgatgtaaaactcaacacagatattaagatggaagatgaactggatcttgaagatgatatcgatcttgatgagaatgttgatctgacagatgagttcgcagaagaagctgttgcagacgaaagtgcagatgcagttgaagaagcagtagcagaaactgatgagtctacagaagaataagataattagagatttatcgtagagattctttttcgagttcggacaaaatcagatatcgcatatagagtttattcgaatagacagacgtcgagggtttgatgcaggctccgggttctgtatacaggaaagactaagaaaaacgaaagattactaagagcaaagcagtgctcggcaaactcgctgccgcttcagacagtagcctcgcactgctttaacgtaatctttcgttttttaagtctttccaagcacacagaacagtcatctgaatcaaaccctcaacgtctatctatcagtaagtttttctgcgctatctgatttctactctctcgaaagaagaactttacttgagaagtaggcgcaacggaaattccctagaatgatatccatatctcaaacgttttttgtagctaataaaatttagcgttgaaatcgtttttttcaataaacagaaaacagaaaatatgagcttcgcggagctttatgttagaagatgggtatagggacgcagacgaatgtggagcatgcttgctcatacttgaaaaacaatagattgcgttaaagaaaggattgacagctgtctgagcggcagcgagtttgtcaatcctttctttgcttttagcagtctgttgtttttcttagtatgaacagtatgcgtaaccctgagtcggcgttcctatgcccatcttctaacaatcaactctctaaaataatattttcagttttcgtccatatatcagtaaaatgatctctacgctaaatctttaattagatagtttcaccatttttgtatttctgaagtacattctgaatacgctcattcggactgagaatctcgctcagtgatccgtcatgattcagagtatcaatgatcagagcaatgtacttgctcatatcacagttgatataatatggttttgaaagaaggtttggtgtctgatagatgaggtttgttgtcaggataccatcaataataccttcttcataagctttgtcaaacttctccattccgttagtaaacagaccaaaagtagcagcggcaaagatacgttttgctttacgtctctttaattctgtagcaacttcaatgatactgtctccggaagaaatcatatcatcaataataattacatctttgccctctacagagcttccaaggaactcatgagcaacgatagggttacgtccgtttacaatctgagtgtaatcacggcgtttgtagaacatacccatatccagaccaagaacgtttgcaagatatacagcacggtttgtaccaccttcatccggactgatcgccatcatatgttcactgtcgatctgaagatcctttaccttgcgaagaagacctttgatgaactgataagttggtgagattgtctcaaatccactcagcggaatcgcatttgatacacgagggtcatgagcatcaaaagtgataatattgtcaactcccatacggacaagctcctgaagcgcaagtgcgcagtcaagagattcacgggaagttctcttatgctgacggctttcataaaggaatggcataataacgttaatacggcgtcccttaccacctacagcagcaatgattctctttaagttctggaaatggtcatccggtgacatatggtttgtgtttcctgtcagagagtaagtaacattgtaattacatacatcaaccatcaggtaaatatcttttcctcgtacagattctccaaggatacctttggcttcaccagaaccaaaacgcggtacgctggcattgatcagataattctctttctcatatccggagaaagcaacatcattcttgtgctcgtgagcgctttcgcggcgccatttaacaaggtaatcatttaccttatttccaagctcttcacagccaagtaaaggaatgattccaaggcttcctactggtatgttctccaagatacgttctgaacgacttaacatgagtcataatcctcctaatgttctaacttctttttaatacgtatatcatcaccgactattttcaacagactatatctgcttgtaattctggagaaagaacgctcagtataaagatcagcgagcgactccaaagaaaggtttgttgaaataatcgttgatttcctatgcagcagcctttcattgatgcaagtaaaaaactgtgatgcaataaaggcgtttgtgtactctgtaccaagatcatcaataataagcagatcacagtcaaaaatgtattcacacatgttatgtgcatcaatgtcatttttgtcaaatgcattcttggcaagagtattaaaaagctgtggagcagaaaaatacaaaacagaatattctctgttcataatctcttttgcgatacaggtggagagaaaggttttcccaacaccgacatctccatagaaaaagagattgttaaactctgtaccaaagctgtcgataaaatgatggcagatgcgcaaagtatcttccatcatggaacgagaagaacgtcccgttttcttatcgtaatgtgaaaccggataatagtcaagtctgaaattgctaaaatctgcttctacagggaattttttaatatttgactggtcataaagcaatccaatgatcgcttttttgaaacaatggcattttttattaccaatgtatccagtgtctttacaatccggacagtcgtaaaccggctccagataatcttctgggaagccggctgatttgagcagatgaatcttacgattacgtaattctgcaagatctttctttaaagcatcaactgcactggtatctccatcaagtagtttctttccatgctgaatagacagtgaggcaatggagtcatcaagtgttttgaattcagggagctttttatagacttcttcataccgggccatctgaatgtcatggctatgtaattgtttctgctcatatttacgcatgattgcatggtactgtgaattttttaatcccatgtaaagactccttttaaattctcttaaatataattgatcttctaaactattgttttttcattagttgctctttaaaagctgctcttccagagaatccatgtcgtaggaacgtctctcaaaattattcagatttcttgtgacattctttggttttgtggcaggacttctatgtaaggaacgttctttctggaattcatgatccaaggcattgatatcagtcagatgatgaatattgcattcataccattttgtgagaatggagtcagcatattcaaaacttggctgatgtgtggcagagattgttctgcggcaggcttcctgaatgatgtcagcggaaaatccataagtatcagcccatttattaatatattccagttcggaagaggcaggtcctctgttcttaatgccgaatgcattcaaaaccgtgtagcagttacggctgtatgcagcagcctgttcttttgcctgtgatatagtttcaactccgttctctacccaggaaatggcaactttctggatataatgcatactcttatgtccgttctctacacaggattcaatcagatattcaatcaaatcagcagacatatgcagcgtatcatagaagtaagtaattgtgtcgacatccgtatgcgtcagtgtcttgccaaggtactgttctgtgataaacaggagagacttgatctccttctgggcacggaatgtatcaagaggaaccgcattggaaacaggagtctggatactgctttctaccggtgcagaaacagcttctgagcggaactctgttaccggagctaccggagcctgagttggaattgaatcctgtggatagcctgatgcacagccggaaaaatcagttgtatctccataagtattctcttcttcatcgcgaagaaattcaacggcagtgattccaccgtccggtccgtgtccaagtctgagaagaccgacagattcccagtaacggaaagcgcgaagaacatcattctctgtattattcagataatctgcgatcatggagatgctcagagaagatgcagcatcctcaacatggcggagaagaaaaaggtatacttttacaaactctccgttcgcattcgccatataatgatctacaaagctgttcggcagcattgtcatattcatctgaaaattattctttaaaaccaaagtcttcataacttatcctgctttctctatgtattaaccaattgccacttgctctgtctgatgaggggcaacctgaaatctatatcttcttctctttagtgtgaatattataacatcatatgagaatcttaaaaagaattttcgagtgggtaactaggacttttttgtagataactatgtggagaaaatgtggataaagtgtggaaaagttcacatgcatgtggatatctatgtgaacttttccacagaatagtttagcaaagttattgagaaagccttattttaaaatgtcttcgccgattttgacaacatctccggctcccattgtgatcaggagatctccggatttgcagttttctttaaggaaagcttctatttcttcaaaacttggaaggtaatgtgcatctgttccaagtttacgtgcttcctctgcaagaccggcagaagaaactccgagagtatctgtctcacgagctgcatagatatctgcaagcaccagatgatccgtgtgagaaagagcttctgcaaattcatggaagaaagcctttgttctcgtataagtatgtggctggaagacacaccatacctgattgtgtgggtagtgctgtgcagccttcagagtagcggcaatctctgtcggatgatgtgcataatcatcgacaacagttacaccgttaaatgttcccttgtattcgaaacgacggtctgttccactgaaagaaagaattccttttttaattgtttccattggaatctgaagcagttcagcagtagcaatagatgcaagtgcatttgacacattatgatcacctgttacagaaagctggatatggtcaaccacttttccgttctttataagatcaaatgcaacaagccctttttcatcataagtgatgttagaagcactgtagtcaagcatatcagaagaaccataagtgatcacattgcagtcaagactatcataaatctcctgataattgtcgatatcaccattgatgatcaaagttccatcagaaggaagaagtgctgcaaactgatggaaagaatgtctgatgtcttcaagatccttgaagaagtccagatgatcttcctcaatattgaggatgacactgatcttcggataaaaatgaaggaaactgtttgtatactcacaggcttctgtgataaaagtctcggattttccaacgcggatgttaccaccgattgccttgagaataccgccgacagaaattgtaggatccagatcggctgcaagtaaaatatgagagatcatggatgtagtagtagtttttccatgagtaccggatacagcgatcggtgtcttgtaatttttcatcagctgtccaagcagctctgcgcgtgtaagcattggaatcttgcgggcaacagcttccataagctctggattagctttattgatcgcagcagtgtatacaacacagtcaattccgtcagaaatgttttcggcacgctgtccgtaatggatgatggcaccttcagactccagcttctttgtaagcggagactcctttgaatctgaaccggatacagtaaatccttcttccagaagaatctcagcaagaccgctcatactgattccgccaattccaataaaatgaatatgtatcggcttttcaaaattgattttatacattgagatacgccctttctttaatagattttataaaataacttgtgattttagtcataaatcttctatatcgtttatattatactatatatcgaaaaaaaagaaagaagatctttttggtagaaattgataaaaaggagaaaaaagtatgaaaaaaattgtaaaatatgtttgttatttctaaatatatggtataatgattctagcttacttgaaatgaggtgacgtaatgtataagaaggaaatgattgccatgctgctggcgggtggacagggcagtcgacttggagtacttacatcaaaagttgcaaaaccagcagttgcttttggtggaaagtaccgtattattgatttcccgcttagcaactgtattaactcgggaatcgatacggttggtgtactgacacagtatcagccgcttcgcctgaatacacatattggaattggaattccgtgggatttggatcgcaacgttggaggtgtatcagttctcccaccatatgagaagagtacaaacagtgagtggtatacaggaacagcgaatgccatttatcagaatctgaattacatagagacttataatccggactatgtactgattctttcaggagatcatatttataagatggattatgaagtgatgcttgatttccacaaggcaaacaatgctgatgtgacaattgcagcaatgccggtgccgatggaagaagcaagccgtttcggaattgtagtgacagatcaggacagcaggatcaaagaattcgaagagaagcctgagaagccaagcagtaatctggcatcgatgggaatctatatcttcagctggccggttcttaaagaggcactcatcaagctgaaagaccagccaaactgtgatttcggaaaacacattattccatattgtcatgaaaaaggggacaggctgtttgcatatgagtacaacggatactggaaagatgttggaacactcagctcttattgggaagcgaatatggaactgatcgatatcattccggagtttaatctttatgaagaattctggaagatctatacgaacagtgcgaatattcctccacagtatattgcagagaatgctgttgtagacaaatgtatcattgcaaacggaacagaaatttacggagaagtccacagttctgttcttggaggaagtgttactgtaggaaagggcagcgtagtccgtgactcaattattatgcagggagttacgatcggagaaaactgcgtgatcgagaaagcaatcatagcagaagacacggtaattggaaatgatgtttctatcggaatcggaagtgaagtcccgaataagatgaaaccgaatatttacagcggtggactggctacgatcggagagaattcagtgattccgggaggagtacagattggaaagaataccgccatcagtggagtgacatcatccgaggattacatagatggagtacttgcaagcggtgagacattgataaaggcaggtgacagagtatgagagcagtaggaattattttagccggcggtaacagcagaaagatgaaagagctgacttcaagacgtgcggcagcagcaatgccggttgccggaagctatcgcgcaattgactttacattaagtaatatgacaaactctcatatccagaaagttgctgtgctgacacagtacaatgcccgttctttgaatgagcatctgaattcctccaaatggtgggatttcggaagaaaacaaggtggattatatgtattcacacctacgatcacagatgataatggttactggtacagaggaacagcagatgcgatttatcagaatctggatttcctgagaagatgtcatgaaccttatgtaatcattacatcaggtgatgcagtctataagatggattataataaagtgctggaatatcatattgcgaagaaagcagatatcactgttgtttgtaaagaacttggagcaggagaagatgcgacaagattcggaaccgttaagatgaatgaatcttgcagaatcgaagaatttgaagaaaaaccgatgattgcaagatcacagacaatctctacaggaatttatgtgatccgcagaagactgctgatcgatcttgtagaacaatgtgcggaagaagagagacatgatttcgtaaatgatatcctgatccgttataagaatgtaaagaagatttatggttataagattgaaagttattggaataatatttcaacagtagatgcatattacaagacgaatatggatttcctgaaaccggaagtgagaaaatatttcttcaaggatctgccaagtgtatattctaaggtgagtgatcagccaccggcaaaatataatccaggtgcgatcgtgaagaacagtctggttggaagtggaagtattattaatggaacgatagagaactcagttattttcaagaaagtatttgttggaaataattgcgtgatcaagaactctatcatattgaatgatgtatatcttggagataatacatacattgagaactgtattgtagagagcagggatacgatccgtgcgaatacaagacatgtaggggaagacggaattaaaatagttattgaaaagaatgaaagatatgcattataagccaagataagcacaaaaaccctgaaaaagggtgttcatattccgtgataatgcaaaagagaaaggggaactgtaatatgcagattacagatgtacgtgtacgtaaagttgcgaaagagggaaagttaaaagcagtagtatctatcacaattgatgaggagtttgttgttcatgatatcaaagtgatcgaaggtgaaaaggggcttttcattgcaatgccaagcaaaaaagcattagatggtgagtatcgtgatatcgcacatccgatcaattcaggaacaagagaacgaattcagtcaacaattcttgcaagatatcagcaggcacttgaagaagagacggagccgttggctgttgacgagatgtagggtattgtggtgctgctcttatcttggataaatgacaagtaaaggcagggctaatacaatagataggaaacaggcgaaaggaaaagtgcagtgattgcccgatcactgcacttttcctttttgtcttataaatgaaaaaccattttttcaccggttgtcggatgtgtgaattccagccgacaggcacaaagcattaactgtcgtgaagtgcatgcagcagtgccatatttccgatctccgatcagagggtgcccggcatgtgcaaactgcacgcggatctgatgatgacgcccggtatccagatgaatttccagttgggaaaaaggttcaccagaaggaagtgtatctgtatggattactttataatgaagtcgtgcatattttgcatcaggcacattttcttcacagacacgggaggtgttggttcgtccgtcttttacaagatagtcttccagagttccttcgttgtgttcgaaaatgcctaaagcctgtgcacggtaatatttcccaaaaccagatgcggtaagctggcgggaaagttcctttgcggcagcaggtgtttttgcaaaaacaagaagtccttctaccggttggtccagccgatggatgacagcaagataaggttcgcgtgaagcggtttttttagcagtattttttatcagatgattttttaaaatactgaccatatcttttgtgccaatgcggctgctctgggtaggaactccagcaggtttatgacagatgataatatccttgtcctcatatattatttcaggggtaagtgatgaaatcatagttgtatccttctttcttgacaatcgctaaagttgcgtctaaactgagaattaataatgttataatgatacatgatgcaaacgaatcaggtcaagcttttaaggagaacatcaatgaataatgactgggaacattttggagaagagataaagcagacgatacaggatgcaattgatacaaaggattacagcagactgaatcagatggtgtcggatacagtgaaccatgcgatggactgtgtctcagcaggaattaaaaacggtggatggtacagagatccgaagacaggacagccattatatggaaatacaaagaatgccggaaacaggtcaggtgcagaaaaccagagatattgtccggtaccggtaagcccaagatatctcaaaggaacttcggtaaagatcggcggaacttttctggcagcgacaggagctgtatttggattgacttctgttattttccttatcatcactttgattgggagtgtgatcacagcgtttgatgtagtcagtggtctgattattggaatttttgcagttgcttttatatcttttgcagtgatgacttatgtaggagtggatatggtacgtacggtgggaaggtttcgccaatatgtatctgttctgagagaccgggaattttgtgatattaaggaaattgcttctgcgacagggcgagatgtcagaaaggttctgaaagatgtgaaaaaaatgattacaaaaggctggttctgtcagggacatctggatgagaaagaatcctgcctgatggtcagtgaacatgcatggaatcagtatacagctcttatggaagacatgaaacagcgcaaggcagaggagcaggctgctcagaaaaagatgcgggaagagtatgacagactttcaccggaagtacagaagatcgtacaggcaggagatgaatatgtgagaaggatcaaggcagcgaatgacgcaattccgggagaagtgatttcggcaaagatttcccgcatggaactgctcgtggatcgtatttttgaccgcgtggagcagaatccggattctgtgaatgatatgcgaagaatgatggattattatcttccgacaacgatgaaacttcttgaagcgtatgaagagctggatgcacagccggtacagggagaaaatatcatttcttccaagaaagagattgaagatacgatagatacattgaatattgcatttgaaaaattactggacagcctgttccaggatacagcatgggatgtatcttcagatatttcagtacttcatacaatgcttgcgcaggaaggtctgacagaagacgggctgaagaagtaatgatatcacaaacagacaatgaatcaaaacagttacaaacagaaatggaggattactatgagtgatgcattcaaggatgtaagtacagtgccgacactgacactggaaccgtttcaagcggaagaagaaaagaaaccggcggtgcagccggaagaaccgaagctggatgatacgattctgacagaagaagagcgcagaatggtagatgcatttgcacagcagatcgatctgacgaattcttctatgattcttcagtatggcgcaggtacacagaaaaagatggcagatttctcagaaagtgctttggaaaatgtgaagtcaaaggatctgggagaagttggtacactgcttacgaatgttgtaactgaactgaagagctttgatgaagaagagagcaaaggatttcttggaatatttaagaaagcatcgaataaagttgaatctatgaaagcaaagtattcgaaagccgaagaaaatgtgaatcagatcgtgaaagcactggacaaccatcaggtgcagcttttaaaagatgttgcgatactcgataaaatgtatgatctgaatcttacttattttaaagagctttctatgtacattcttgcaggaaagaaaaaactggaagaagtaagaagcacacagcttgctgaattgatgagcaaagctcaggtaagcggcctcccggaagatgcgcaggcagcaaaagatctggattcgatgtgcaaccgttttgaaaagaagttacatgatcttgaactgacgagaatgatctccatccagaccgcaccacagatccgtctggttcagaataatgatacacagatggtagagaagatccagtctacaatcgtgaatacgattccgttgtggaagagtcagatgcttctcgcacttggagtagaacattcttcacaggcggcggcagcacagagacaggtgacggatatgacaaatgaactgttgaagaagaatgcggagacattaaaaatgtccacaattgagactgcaaaagagtctgaaagaggaattgcagatctcgagacattaaaagcaacaaatgaatcactgatctctacattggatgaagtgatgaacattcagagagaaggaagagaaaaacgccgggaagcggaggcggaacttcgtaatatggaaaatgaattgaaagcaaagcttctggaaattagaggataaagctttttggcttgacagcgggtgttttatcagttagaatttcatttgataactgacgttgaacgggaatagtagatacgcagcatgcttcagagagaaggcggcaggtgagagcctttgcattacggtatggaaccggcccgggagtccctgtatgaaagtacagcgtaggtcctgcgttaaaggagaagaaagtgaatgcagatacagagatcatttgtgttggttttgattatagaatggatgtattgcattaattagggtggtaccgccggagatattcggtccctatcgtggggatgcgatatcccggcgattttttatattaaagtaaaagcaaactgctgtcaggggacagcaatgcaaaaaaacaaaaaggagaagaacaatggcaaagaaattagtacagaatatcactgccagagaagaagattttgctcagtggtatacagatgttgtgcgtgaagcaaaactgtgtgattattcaggtgttaaaggatgtatgaactaccttccgaacggatatgctctgtgggagaatattcagaagaatctggatgcacgtttcaaagagacaggagtagagaatgtataccttccagttatgatcccggaaagccttcttcagaaagaaaaggatcatatcgaaggatttgcaccggaagttgcatgggtaacacatggtggactggaagaacttcaggaaagattctgtatccgtcctacatctgagacactgttctgtgatgtctggagcaagacagttcagtcttaccgtgatcttcctaaggtgtggaatcagtggtgttccgttcttcgttgggagaagacaacaagaccattccttcgttccagagagttcctgtggcaggaaggacatacaatccatgcaacatacgaagaagcagaagagcgtacaaaacagatgtggagagtctacagagactttgcacaggatgttcttgcaatcccggtagtttccggacgtaagacagagagtgagaaattcgcaggagcacaggatacttatacaatcgaagcgctgatgcatgacggaaaagcactccagtcagcaacaagtcacttcttcggaagttccttcccaagtgcattcggtattcagtattcagataagaataacgaacttcatgaagtatacgagacatcctggggactgtctacaagaatcatcggtgcgctgatcatggtacacggagatgacagtggacttgttattccaccaagaatcgcaccggtgcagacaatgatcattccgatcgctcagcataaagaaggtgtccttgataaggcaaatgaacttgttgatacattgaaggcagcaggatacaaagtgaaaatcgacgattctgacaaagcacctggatggaagttcagcggacaggagatccttggaatcccgacacgtatcgagatcggaccgaaagacatcgagaacaatcaggcagttatcgtacgccgtgatacaagagagaagatcgttgtttctctggatgagcttacaacaaaacttgctgaagttcttgagacaatgcagaacgatatgttcgaaagagcaaaagcattccttgattctcatatcaatgaagcaacaacaatggatgagatgaatgagaagttcaatgagaaccttggattcatcaaagcaatgtggtgtggagacgaagcctgtgaagatgaaatcaaagctcagacaggcggagctacatctagatgtattccagaagaggaagaacatctttcagatgtatgtgtatgctgcggaaaaccggcgaagcatatggtatactggggcaaggcatactaatttatttcgttgaaaataaagaagagatttactttcatagttgctagaaaaaagaatttgatttaataacaaataacagatggtttcttaagaaaaaaagagagtgccatctgttatttttgtatgaaaaataatatggaaaatgcgaaaaaagccttgactttcggcgctaaacgtaataaactaaacgagcgtgtggaaaaaggaaatgtctttttgatgcgcaaataaggataatgacttaattatccgcagccccttgaggcataagcccaaggtaacgaataattcataggaggtgaaaagaatgccaacatttaaccagttagttagaaaaggacgtcagacttctgagaagaaatctacagcaccggcacttcagaaaggatacaactccctgaagaaacgtgcaactgatgtttctgcaccacagaagagaggtgtatgtacagcagttaagacagctacacctaagaagcctaactcagctctgagaaagatcgccagagttcgtctgtcaaacggaatcgaagtaacaagctacattccaggtgaaggacacaaccttcaggagcatagcgttgttatgatccgtggaggaagagttaaggacctgccaggtacaagataccacattatccgtggaacacttgatacagcaggtgttgctaagagaagacaggctcgttctaaatacggtgctaagagaccgaaagacgctaaataagaagtcgcggattgcagtatagtattttagataagtgtaactaatagttaaatcgtatcacaaacagaactatgattagtcgtaggttgcggatgctatatagatttcgcggctgcgagcacatggaatgtgatctcatagaaagacacatgtgagtaccgatgaattaatcccggaaaaaccggaaaatatgattaaggagggaaggaccgtgccacgtaaaggacatactcagaagagagatgtattagcggatccaatatacaacaataaagttgttaccaaacttatcaacaacatcatgcttgatggtaagaaaggcgtagcacagaagattgtatacggagcatttgaaagagtagaagctaaggctgagaagccggctattgaagtgtttgaagaggctatgaacaacatgatgccagttcttgaagttaaagcaagacgtatcggtggagcaacataccaggtaccgatcgaggttagagctgacagaagacaggcactcgcacttcgctggttaactatgtattcacgtcagagaggcgagaagacacaggaagaaagactggcaaacgagattcttgatgcagctaacaacacaggtggagctgtaaagagaaaagaagatatgcacaagatggcagaagcaaacaaggcgtttgctcactatcgtttctaattattttaggaggaaaaaatcttggctggaagagaatatccattagagagaaccagaaatatcggtattatggctcatattgatgctggtaagactacactgacagagcgtattctttactataccggtgttaactataagattggtgatactcatgaaggtactgcaacaatggactggatggaacaggagcaggaaagaggtatcacaattacttcagccgctacaacatgtcactggacattggaagagaagacaaaagtgaaaccgggcgctttagagcatcgtatcaatatcattgatactccgggacacgttgacttcactgtagaggttgagcgttcactccgtgtacttgatggagctgtcggcgtattctgtgctaagggtggtgttgagccgcagtcagaaaacgtatggcgtcaggcagacacatacaacgtaccacgtatggcattcatcaataagatggacatccttggtgctgatttctacaatgctgtagatcagatcaagacaagacttggaaagaacgctatttgtcttcagcttccaatcggaaaagaagacgaattcaaaggaatcatcgatctgttcgagatgcaggcctacatctacaatgatgagaagggggaagacatcactgtaacagatattccggaagagatgcaggatgaagctgagctttatcacacagaactcgtagagaaaatctgtgagctggatgatgaccttatgatggaataccttgagggtgaagaaccttctatcgatgcaatgaaagcagttctgagaaaagctacatgtgagtgtacagctgttccggtatgctgcggtactgcatacagaaacaaaggtgttcagaaactccttgatgcaatcatcgagtttatgccggctccaacagacatcccggcaatcgagggtgttgatgaagacggaaacgaagtagtaagacactcttctgatgaagagccgttctctgctctcgtatttaagatcatgacagacccattcgtaggtaagcttgcttacttccgtgtgtattcaggtgttatgaactccggttcttatgtactgaatgctactaaaaataaaaaagagcgtgttggacgtatccttcagatgcatgccaacaagcgtgaagagctggataaagtatattcaggagatatcgctgcagcaatcggattcaagttctctacaacaggagatacaatctgcgacgagcagcatccagtaattcttgagtccatggaattcccagagccagttattgagctcgctatcgagcctaagacaaaggcttcacagggaaaacttggagagtctcttgcaaaacttgcagaagaagacccgacattccgtgctcatacagataaagaaactggacagacaatcattgctggtatgggtgagcttcatcttgagatcatcgtagacagacttcttcgtgagttcaaggtagaggctaacgtaggcgcacctcaggttgcttacaaagagtccattacaaaagcagttgatatcgacagcaagtatgcaaaacagtctggtggacgtggacagtatggacactgtaaagttaaattcgagccaatggatgtcaacggtgaggagacatacaagttcgagtctactgtagttggtggagctattccgaaggaatacatcccggcagtaggtgaaggtattgaagaagctatgaagtctggtatccttggaggatttcctgtagttggtgtttacgctaacgtatacgacggatcttaccatgaagtcgattccagtgagatggcattccacatcgctggttcccttgcattcaaggatgctatgaaacagggcgcacctgtacttcttgagcctatcatgaaggtagaggttacaatgcctgaagaatatatgggagatatcatcggagacctgaactcacgtcgtggacgtattgaaggtatggatgatctcggtggcggaaagatcgtacgtgcgtacgttcctctgtcagaaatgtttggatactctacagatcttcgttccagaacacagggacgtggtaactactcaatgttctttgagaaatacgagccagtaccgaagtctgtacaggagaaagtattatccaacaaaaatgcctaaaatatcataaaaggcttgaaaatcggctaagtttgaaatataatcaaacttagccaggtttaaaatagaaaaccaaaacaaggttgccccattgagggttatatttttaaggaggatattcaaaatggcaaaggctaaatttgaaagaacaaaaccgcattgtaatatcggtactatcggacacgttgaccatggtaaaacaactcttacagctgctatcacaaaagtactttctcacagagtagaaggtaacgcatctgtagatttcgagaacatcgataaggctccagaagaaagagagcgtggaatcacaatctctacagcacacgttgagtatgagacagctaaccgtcactacgcacacgttgactgcccaggacatgctgactacgttaagaacatgatcacaggagcagctcagatggacggagctatccttgttgtagctgcaacagacggagttatggctcagactaaagagcatattcttctgtcccgtcaggttaacgtaccatatatcgttgtattcatgaacaaatgtgacatggtagacgacgaagagcttcttgaactcgtagagatggagatccgtgaagtacttaacgagtatgacttcccaggagatgacacaccgatcatccagggatcagctcttaaggctcttgaagatccagacggagagtggggagacaagatcatggaactcatggacgctgttgatacatggatcccaacaccagagcgtgctacagacaagccattccttatgccagtagaggacgtattctctatcacaggacgtggaacagttgcaactggtagagtagagcgtggaacacttcacgtatctgacgaagttgaaatcatcggtatccacgaggacgttaagaagactgttgtaacaggaatcgagatgttccgtaagcttcttgatgaggctcaggctggagataacatcggagcacttcttcgtggtattcagagaacagagatcgaaagaggacaggttcttatcaaaccaggtacagtaagctgccataagaaattcacatgccaggtttacgtactgacaaaagacgagggtggacgtcatactccattcttcaacaactaccgtccacagttctacttcagaacaacagacgtaacaggtgtttgcgagcttccagaaggaatcgagatgtgtatgcctggagataacgtagagatgacagttgaactgatccatccagtagctatggaggaaggtcttcgtttcgctatccgtgaaggtggacgtacagtaggatcaggtacagttgcttcaatcatcgagtaattaatatctagatagatttaatatcgatacttaaaatgaaatatgcccgcagagcttatgctctgtgggttttttgtgttggaaattttgaatggaatagcgaatagtataaaaaacggttgtcaaaataaaaaaatacgagaaaaagtagagatgccgatggaaaggatggttgagtattggggagtgatggaagaaagcactctgaaaattatgtattcatagtagtagataaccactaaaaaggaaaaagcaagcgaaagtatgttcgtattttcgcttgctttttaaattatattagagtataatagggaaaaaacaggtataaatatattcccagggagtgatgagaatgagacaggtacatataagagttgatgatgagttatataatgagctgaattcatattcagaaaagaatgaattgagtatgcaggactgtgttagagaagcagtagcatattatatgagtgatgtaaaaaagaagaagaatacagggaaagagaaaaaatttacatttattgatctttttgctgggattggtggtatgcgtattgcatttgaccgggccggcggtcaatgtgtttattcaagtgaatggaacaaatatagtcagcagacttattttgcaaactttggagaacagccggaaggagatattacaaaagttaatgccgaagatattccggatcatgatattctggttgcgggatttccgtgtcagcctttttcaatagccggggtatcaaagaaaaacagtatgggaagagccaccggatttgaggataaaacacagggcactttgttttttgatgtctgcaggatattgaaagaaaaaagacctaaggcatttatgcttgaaaatgttaaaaatttatgcagccatgataaaggaagaacttttcaggtaatcagagagtcactggatgagttgggctatgaaattttctataaagttctggatggacagaattatgttcctcagcacagagagagaatattaattgtaggatttgacagagaacgctatggagataaaattgattttgagtttaatcttacaccacgtgttccaaaacccgttatgagagatattcttgatgaagaggttgcggacaaatacacattgtctgataaattgtggacatatctgcagaattacgcagcaaagcatcgggcagctggtaacggatttggatatggaatagctcctttggatggagtgtcccggacattgagtgctaggtattacaaagatggatcggaagtgcttattgcacaggaaggaaagaatccgagaaggctgactccaagagaatgtgcaagattgcagggctttccggatacatttaagattcctgtttcggatacacaggcatataagcaatttggaaattctgtagttgttccattaatgggagaagttgcaaaactaattgtagatgaaattgacagattggataaagaaggtgcggaatggaaacaggttatttaaataaatacttttccggggtgattgtaaaaaaattatctgaagttgaagctaatattgaaagtagtaatcagcatgaacttaatggaaataaagccatgcgacagatattgggaacagatatccaaagaagagagtttgacacgatatttttatatatggaagatgattttactatagatgcatccggaaagatgacatggtatgattcaaggtacaataatccaaaaaggacagaatggagattttactttccaacgacagaagtatcaaaacgtgcaaaagtcggagacagtctttttatatgcaaaagaacagatgataccttacttattatcattgccaagaaagatagtacaatagaaaatcagttatattggttattcgatttgaacgaggaagatgcggaaagatttattggaaaaactgaatttagcagtggagataaacaaattgaattcgctgtcagaatgattttagaacaaataggaattgaatatgaagatcgaagtatagaatcttatcttgaaccgatgttaattgaatttcatggaagttttccaacgacaagggaattttctgcatatgcaagaaatacaattacggatgtagatcctgtagaaaatccagatgatactttacttaaatgggtgaaccgagaggaagcattatttaagttactggaacaatatctgataaaagagcgaattcagcagggatttaaggtgggtgaagatgttgatgtggatgcatttatccaattttcgctttctgtgcaaaacagaagaaaaagcagagcaggattatctttggagaatcatatagaagcattgttaaaagaacagaaaattatatattcacatacaccagttactgaagataaatcgaagccggattttattttcccaaatatagaagcgtacagagataaaacatatccggaagtagaattgacaatgttgggagctaaaagtacatgtaaagacagatggcgacaggtattgtctgaagcagagcgaatagaacgcaaacacttgctgacacttgaatcggcaataagtgaaaatcagactaatgaaatgattaataaaaaattacaactggtgttgccattgccaattcatgaaacatatacattaaaacagcgagattggctctattctgtgaaaatgtttttggaagaagtaaaagaaaaacagaaattttatgagagaaagcagatataattatggatataaaaagtccggaagaacgtagcaaaaatatggcagcaatacattcaaagaatacgaaaccggaaatatatctgagaaaattattgtttgccaagggttacagatacggagtaaattcaaaaagtgtaccgggacatccagatatatacatgaaaaaatataatacagcaatttttgtacatgggtgtttttggcacaggcatgagggatgcaaatatgcttatatgccaaaatcaaagatagaattctggcagaaaaagtttagtgcaaatgtaaatagggataaaatagtcagaaaagaattacaggaactcaaaataaagcagcttattatatgggaatgtacaataaaggaaatgaaaaaagatgaaatatacagggataaaatagtaggacaaataatagatttttttggtgagttggattattttcgggaaatttaaattatggcatgatcttttgaaattcagtttcagagatcgtgctgattttattttttgaacttgtagcttaaaggatagtatggtacaatgataaaaaaatagcactcatcagcggcgagtgctaacaaaaaaaacgacatttagagaaagaggtattattatggaagaatatttaaacttgggcggaaattctaatgtaaaagcgtattcaattggacaggactatatagatgtagtttttggaagaggagctcgttatcgttattcttacagaagtgcaggaatagataaagttgagcagatgaaaatgcttgcaaggaagggcgttggcttaaattcgtatattatgaggtatgcgaagatggactatgaaaaataatctggaggggtgtagatgtatcatgtagaagtgaaaaattgtaacagtattttgacgggtaacataaaggttgaagaaggaaaattaaatattaagtatggaataaatggaactggaaagacgacgatagcaaaggcaatagaagtagcaaataatccagaaaagcttcaggagttaaaatcatattttgcagaggacccggctggtgtaacaatgaatcccccatttgaaaaggttcttgtgtttaatgaggagtttgttgacaaggttgtttttaaagaggatgaggtgatagagaattcgtttgaagtttttttaaaaacaccgacgtatgatagtaagaaagagcagttggatcagcatttaaagtcgttacatcagattatggaaaaagattcagaagttatagaattgcaggaattgatggaaaaaattggtggaaagtttaaaagaacagccaagggaacattgaacagacgtggaacaatgaaaagtctgttaacaaaacaaaatctgtataatgttccaaatgaattagaggtttacaaagatttttttgcgaataaagatattaatatagagtggatagactggaagaacaaaggcgatacatatgacattgaagacagatgtccgtattgttctgaaaaggtaaaccggattgaacacgacaagcgtaaagagatatttcaaaagaattatacaaaaacagattcacaaaatttgaaggaactattagatctgctggaaagtttggaagcttatattaaaccagaccaatatacaacgttgatatcttatgtgaaaaatgataccccggaagatattattgaaaagattatgagcgatttgctgggggaatttgatttgattttgtccagatttattgctattgaagagtttggaaacagaaagatcgtcataaatgatatatcgaaactagacacacaaattgcatcaatgatatttccgcaagaattattccatatatttggtggtgaaaaaatagagggagtatttgaacggattaataataaagtagataaattgcggtcggaagttgcggtcctaaaacaggaaatgggagcactcaagggaattatgcaggcaactatagttcaatcacaaacggacataaatgaatttctgaaaacagccggcataaattatgagttagtaattaaaacggaagatgaatccaatagtagaactatattgaaacaatgttttacagaagaaaaaacagatgttacaaaaatcagacaacatttaagttggggagagaaaaatgcattttcattgatactttttatgtattatgccaatttgcaagattctgatttgattattttggatgatccgatttcttcgttcgatactaataaaaaatatgctattctacagagaatgttcaaaaatgtaggcaataaaaatgttacgtttgcaggtaaaacagtactgttattaacacatgattttgaacctattacggattttattgtagttgggaaattagatgaaagtaaagcggttgcttcatttatttgtaatgttgaaggaaaagtgatagaaaaagatattaatccggaagatgacgttaagttgattttgcgtgagtgtaaagagatttctactgatgagaatgttaatgttgtaagccgaattgcttttcttaggaaattatgcgaattaaatgaatgcagagatgcttggggaaatgcatatgagattttatcttgccttgtacatgccagaccgataaaaagaaaaattgctagtgatgtatatgaggatatgttacctgaagaaatcaatgaaggattaaataaaatcaaagaatttattccagattttaattatgaagagttgcttgaaaatacatatacgatagatcatatcaaagaattgtataattcggaattaaatgcttatctgaaaattcaattgttcagggcgttgaaagacatagttgatgataaacagttgcgtttaagaccgatggacagtgcatggtataaatttattgatgaaacctatcatatagaaaatgattatttacactatcttgatgttatgaagtttaatattgtaccggattacattatgaaaaaagtagatggaataatgagtgaactataaaactgtgataacatcatgataacaaaatctccaaacccacatggacacatcggaaaatctggattttccccacgaatcacacggaaaatcacatttgtacaccggtctgctattcctgaaggcagacctacagcagaaacaggtaaaatttctacaattatcgagtaataatatctagtcagacttaatatcgatattagaaaaaagaactaccgttagacgattagtccacatttttattaattacaaaagtcacctcatagctttgcactgaggttatttttgtatcctactattatttcccccaatatgttgtgccttgaaaaatcctgttgaaactgcccgcatttctcagtataatatcactgtattaggaaatactttgaaaaacgtctgttagggaagattctctaacggacgtttttggggataatcaaaatcatatggctaatgggaggaatttatggataaggcatatttaaagcaggcaagtaccgttgcaaaggtcatttttggaaatgttttctatgcttttgtaatcaaactttttcttttacctgggaatctgatgacaggaggaacaaccggtattggtctggtagtgaagcattttacgggagcatcaatttctggatttgtcttagcatttaatattgtgatgctgatagttggagtgatttttcttggtaagaaatttgcactgacgacaattctcagttctttcacatatccaattgcattggaagcggccaatcatattttgggggatctggtgatcacggataatccaatgctgaatacgatttttgccggacttggaatcgggattggacttggtattgtaattcgaacaggagcttctaccggaggtatggatattccaccgttgattttgaataagtattttcgaattccggtgtcagtgagtctgaatgtatttgatatattgattctgttaccgcaaattctatataatcctccggaacgcgttttatacggaattttactggtaatgatctacacgacagtgctggacaaagtgttagtgatgggaaataccaagacggaagtgaagattatcagcaaacaggtggaagaagtacgtcaggcaattcttgcgcaggtagacagaggcgtgacgatgctgtatggggaaggcggttacaaacaagaacaaaagcagattgtattgagtattgtgtctaatcgagaacttccacaagttgagaaattgatcagacagattgacccggaggcatttatgatcatcagcagagttacagaggtacgaggaagaggcttctctttgagtaaacattacggagaagaggaaggctgatgatgctgcaaaaacagtactgtagattaaacatttatagaattaaggaagaacagtcgtatgctaaataaaaaagatttcttaaaatacgcatcaaaattagcctttccgatcatgattcaaaatttgattggaacattggtaaacattgccgatacggtaatgcttggatacgtaagccagacggcgatgtcagcttcatcacttgcgaaccagtatacgtttattctgttctgcttatattacggtatggctacaggaacttcggttctgtgtgcccagtactggggaaaaggggataaaaagacagtagaaaggattctcggtcttgcggaacggatttcactgatcgtctcgcttatatttttcgttatttcctttactatgccggttacggttatgaagattttcacaaatagtccggatacgattgctgccggaagtgagtatttgaaggtgatttcattttcatttatgtttatggggttctcgcaggtttttatgagcgctcttcgaagtattggaaaaataatgctgccttctattacgtacattgtttctctttgtgtcaatgtactttgtaatgccacatttatctttggtctgtttggatttccaaagcttggcgttacaggtgttgcacttggtactgtgattgccagaattacagaggtattaatttgtctcatctattcattaaacagttcagatgtcagattccggataaaatacttctttgcgaaatcaggcattttgtttcatgactttatgaaaattgccactccagccgtggtaaatgatgttgtctggagttttgccacttcagcatttgcagcaattcttgggcatatcggagatgacatggttgccgcaaatgcggttgctgttatggtggtaaatattggtgctattgcctgccgcggttttgcaaatgctacgactatcattatcagccaggagttagggaaagatcaaattgatacagccggagaatacgggaaacggatgcttaggataacacttgctgtaagcctgatcggatgcgttattattctggcgattcgtcctctgatactggacttctatcgggataaattgaccgagactgccctttcttatcttagcatttttataattatgacaacctggcgtcttgtgggagaaggaattaatacctgccttatatgtgggtgtttcagaggcggcggtgattccagatttggaatgatcgtagattccatatttatgtggcttgttgcagttccggctactttccttgcagcatatgtttttaaattaccgcctgtctgggtttactttgtaatgactttagatgagttcgagaaaatgcccgtggtatttattcactatttcagaaagaaatggcttacaaatattaccagagattttgattgaggagaaatatgatcatgtcaaaagatgaatatctaatcacagatgcgcccctgaaagcgttaactgtttttgcaatgcctatgatcttaggcagtttttttcagcaaatatataatatggctgattcgatcattgtcggtcagtttgttggttcttcggcacttgcggctgtcggtgcttgtgctgcacttacgaatgttttcatttgtgtagctctgggcgccggtgtaggcgcaggtgtactcgtaagccgttattttggagccagagattatggtaaaatgaaaacaattgtgtcgacatcgctgatcagctttttagtcctgagcatactacttggaatctttggtttttgcttttcacattcaatgatgagtttattacaaacacctcctgatatactggatgaagcagtgctgtatctgcgggtttattttgtgggattcccatttctgtttatgtacaacatcctctcaacgatgtttacttccatcggtgaatccagaattccattggttcttctgattttttcatccgtattaaatatttttatggatctttggatggtagccggacttggtctcggcgtgtttggtgcggccctggcaacgcttattgcacaggggatttccgcggtcttttcatttctgattttcctttatagaatgagacggtataaatgtcagtttgaatggtttgacggacaggagttatattcgatgcttcaaattgccgtaccgtcagttctccagcagtctacagtgtcgatcggtatgatgatcgtacaggcagttgtaaatccatttggcacacaggcgctcgcaggttattcggcaacgatgcgagtggaaaatgttttttcactgatttttgtatccatcggcaatgcgatttcgccgtatatatcccagaatcttggtgcaaagaaaatcgaacggctcaaaaaaggctatcatgcggcactggtgttagatctaggttttgcagtccttgcttttctggttattgaatcactgcacaatcagatttcttccttattccttggaaaagatggaacagctttagcgtatcaggtatccggtgattatatgagatggctggggtattttttcatctttatgggtatcaagatggcaaccgatggtgttcttcgcggacttggaatcatgcgtccgtttctcattgcgaatatggtaaatcttgcgatccgtttgtctgtcgctttgatttgtgcaccgcggttcggaattgcatttgtctggctcgcagtaccggccggatggcttgcaaacttcctgatttcttatgcagcactcagaaaatcatggccgagtattgaggaagataaaggagcaatatcatgcagaaaatactgattgtagaagacgatacaaatattaataacttgcttcaggaggcattatccaaagaaggctattcctgtgagcaggcattttccgggaccgaagcaaagctgcttttaaatatgcaggagcacggttatgcactcgtgctgctggatctgatgctgcccggaattccaggtgaggcagttctggaggaaatacggaaaaagggaaatcttccggttattgtgttgactgcaaaagacagcctggatgaaaaggtagaggttttaacgagcggagcggatgattatataacgaaaccatttgaaatcagggaagtgctggcaagagttcaggtacaactccgtcataaagaagaaaaggaagcagaggaacagcatacgctttcatttaaagatatgctattaaacagagatacatttcaggttgaaattgctggaaagatacttccgaagatcacaaaacaggagtttgcgattttagaattactgctcaggaatccaaaacaggttttcagtaaagaggatattttcgaatatgcctgggacgaaccttatattggtgagacgaagacattggacgtacatatcagcaacatccgcaagaagatcaaacaagtgacttcggaggaatacattgagacagtatggggaatcggttatcgtcttcatgcgtaatctttactctttttttactatttatttgcgtttgattaggattcatcttttatgataaatgcagataagaaaaaggagatgaaaaatttgagtgagatgttattggaaacacgaggactgacgaagcggtatggacatcataaagctgtggacagtgtcagcatgcatattaaaaagggcgctatctatggatttatcggacgaaatggagccgggaagacgacttgcctgaagatgatcagtggactttccaggccaacgagtggagagattgagatcttcggatacaagggaaaggatttacagaaagtccgctcccgagtgggatgtctgattgaagcaccgggattatatggaaatatgaccgcatatgaaaatctgaatatcaaatgcaagctgtttgggataaagaaagcaggttacattgaatagatattgaaaacagtaggtctggagcatgtgggacggaaaaagacaaaacacttttctcttggaatgaaacagcgtctgggaattggtcttgcgttggttggagaaccggatctgttagtccttgatgaaccgatcaatgggttggatccacaggggattgctgaggttcgtgatacgattcagaggcttcagaaagaaaggaatatgacgatttgcatttccagtcatatactggaggaattatcgaagattgctaccgattatggaatcattcacaatggaagtttattgcaggagcttacgagagaagaattaatgcgaagatgcagtgagcggatggaattaacactggctgatccgaagctggcaattccggtgctggatgctatgggatttacgaattatcaggtaacagacaaagaacatattcacatttttgaacgtctgaatgaaagcgcagcgttgaatatggagcttgcaaaggcaggaattccggtaaaagggctttctataacgagtgaagaactggaaacgtatttcctgaatctgacaggaggtgccagccatgcttaatatgataaaaatggatttgtaccggatgtttcggaccaaaagtatgtatgtagtatggatcgtgctggctgtgtcagtactgtttacaacgtttatgtgtaaaacagattatgatttattaagtaaagaagataccgtgcggcaggagcagtttgcggaaccgactgcggagaatattaatgtgggaatgatggtgacactgccgacagaaccgggagaaaaggttacggtgtatgacattttctttgcaaattctcagggaaaattttatgcgttgtttctggtgatttttgctgtgatgttttcaacagcggatattggaagcggttatattaaaaatattggcggccaggttcaaaaaagaggaacactgattttttccagatctattgcgttggcggtctttacggtgctgacaatggcaggtgcattcttgctccagggagctgcgaactatatagtattcaaagaattgacgttgggaagttcaaaagctattctgtcttatttcctgacggagctggcacttcattatgcactcgtgttgatctgcatggcgattgcaattattctgaaaaataatgtgatcagcatggtcatcgcgatttgtcttacaatgaatataatgagtatcgtatacggattaataaacagtgctgttcggaaaatgggaatccagaatttccagatttataagtatacgataaccgggaaattatcactgcttcctatgaatccaagtggaaatgagtgtctggcagcattcggcgtggcaattgtgtttgctgtcataatgatagctgcaagcagtgctgtttttcaaaagagggatatttagcggatgtatatcgtaattggaatattagcaggaattatcattttacaatttattattatgtggaaatatcagcggcaggtgaaggacatctgccgccaattggcgttcttgatgaaacatgacagtaacatgttgattcaacgcgagtttgatttgggtggaatcggaacgctttcagacagattgaatgaacttctggaattacaaagaaaagagaagcagcgttatcaggagaaagaagctttgatcgcggatacttatacgaatctttcccatgatatccggacaccgctgacatctctggatggatattttcagcttatggaagaatgcgaaaatgtcgaagaccagagacgttatctgaatattattcatgaaagaatacacagtctgaatgaaatgctggaagaacttttcatgttcacaaagttaaaaaatgaatcctatagtctggaactgacgccttgctgtatcaaccggattctgaaagaaacggtgttttcctattatgatgactgggtaagaaggggaatccagccggatattcagattacagaagaactgttgtccatagccggaaataaacaaggactccaccgtgttattcagaatgtaattaaaaatggtctggatcatggagaaaagaagataagtattgtgttagagcgcaagcaggagcatgcagtattgcgaatcaggaatcaggtgatacattcggagcagattgatatagaacatgtctttgacagattttataaagcggatgtggcaaggagcaaaacatctaccggattgggactatctattgcaaaggaacttgtgaaacgtatgaatggagaaatcagcgcaaagacagagaaaaatgagtttattattgagatgagatttccgctttctatctaaaaaatcagtaaaaattgcactttattgagttacaatgctgaattgcgaaaatttagatttaccgaaacactgaaatatgttaatatggtagcagttatttcaaaactatagatcagattgaaggaggtctttacatgattaaattgtacgagaatggcgtatatcttctcaatggaacagagatagtagaagacacaggaaatgtgcaggttccgctgacgaaggaagaagccgctcagaacacaatggcatatggtattttaaaggcacacaatacatccgagaacatggagcgtctgcagatccgttttgataagctgacatcccatgacattacatttgttggaattatccagacagcacgtgcatcaggacttgagaagttcccgatgccgtatgtacttacaaattgtcataacagtctttgtgcagttggtggaacaatcaacgaagatgatcatatgtttggattaacttgtgcgaagaagtacggcggtatgtatgtaccaccgcatcaggcagttatccatcagtttgcccgtgagatgcttgcaggcggaggaaagatgatccttggatctgacagccatacacgttacggagcacttggaacgatggctatgggtgaaggtggaccagagcttgtgaaacagcttctgaacaagacttatgatattaagatgccgggcgtgatcggaatctacttagacggagagccgatgaaaggtgtaggaccgcaggacgttgctcttgcaatcatcggagctacattcaagaacggctatgtgaataacaaggttatggagtttgttggacctggagtcagcaagcttagtgcagatttccgtatcggaatcgacgttatgacaacagagacaacttgtctgtcttctatctggaaaacagatgagaagattcaggagttctatgatattcacggaagaagtgaagattacaaagaactgaatcctggagcagttacatattatgacggtatggtttatgtgaacttaagcgagatcaagccaatgatcgcaatgccgttccacccaagcaatgtttatacaattgatgaactgaacgcaaatctggcagacatccttcatgatgtagagcagaaagcacttgtaagtcttgacggtgcagttgattactctctgcaggataagatcagaaacggtaagttctatgtagagcagggaatcatcgcaggatgtgcaggtggtggatttgaaaatatctgtgcagctgcagatatcatcaaaggaaagaacatcggagcagatgaatttacattcagcgtttacccggcaagtacaccgatttatatggaacttgttaagaatggtgcaattgcagatcttatggaagcaggaactgttgtgaagacagcattctgtggaccgtgcttcggagcaggagatactccggcgaataacgcattctctatccgtcatacaacaagaaacttcccgaaccgtgaaggaagtaagctgcagaacggacagatctcttctgtagcactgatggatgctcgttctatcgcagcaacagcagcaaacaagggattcttaacaccggcaacggcaatggatgtagagtacaaaggacagaaatatcactttgataagaacatttatgcaaaccgtgtatttgacagcaagggcgttgctgatccaagcgttgagattaaatttggaccaaacattaaggactggccggcaatgtcagcacttccacagaacctgcttgtgaaggttgtatctgagatccatgatcctgttacaacaacagatgagctgattccgtccggagagacatcttcttaccgttctaatccactgggacttgcagagttcgctctttcaagaaaagatcctgcatacgtcggacgtgcgaaagaagtacagaaagctcagaaagcaattgaagcagatgaatgtccggtagatgcacttgcagaactgaaaccggtgatggataagattcacgagacatatccggaagttggcaagggtaaccttggtgtcggaagtacaatcttcgcagtaaaaccaggagacggatctgctcgtgagcaggcagcttcctgtcagaaagtacttggaggatgggcaaacatcgcaacagagtatgcaacaaagcgttatcgttcaaacctgatcaactggggaatgctcccattcctgacagaagaagatcatgaagcactttccttcaagaacggagattacatctttgttcctaatgtgagaaaagcagtagaagagaaagcggatgtgatcaaagcttatgttgtaggtgatgaactcaaagaactgaaccttaagctgggagatctgacagacgcagagcgtgagatcattcttgacggatgcctgatcaattactatagaaatcattagtcatcattgaaaatcatgaatcaattattggatatgataaaatgaaagaaaagcggcgagatatgggaaatgacctgtatctcgctgtttttatcttgctaattaaattttcacatgctagtattaaaacgaaataaaatgtaacacgttaaggtataagaatgaaaaaatctgcttatgaaatgtctgatttagttagttgtgcggaacttgagaaccttggacattggggcgatggatgtattatatgaagacggaaagaattatttgtggtaaaataaagcacaagattagaaatattgaaaacaggcggtaaataaaatgatatttgatacacatgcgcattatgatgatgagcagtttgacacagacagagatgagctactaagcagtatggcagcaggcggcgttggaacaattgtggatgcagcggcgacagtagagtcctgggataagatagtagaactcgcagagaaatattcatttatatatggatcagtaggtgtacatccggacgaagtcggtgcactgaataaagagaatttcgctcgaatgagagaagtattaaagaaagaaaagatcgttgcggttggcgagatcggacttgattattattgggataaagaagggcatgatctgcagaaacattggttcatcagacagctggatcttgcacgagagatgaacaaacctgtgatgatccatagccgtgaggcggcagctgatacgatggaaattatgaaagaacatggaaaaggactcaaaggtgtgatacactgttattcttacagccttgagatggcgcgagaatatgtaaagatgggatattacatcggagtcggcggtgttgtgacattcaagaactcaaagaagttaaaagagattgtagaagaaattccactggagtcaattgttcttgagacagactgtccgtatctggcaccgacaccgttcagagggaagagaaattcgtccttgtacctgccatatgttgtagaagcaatcgcagagctaaaaggcatttctgcggagcaggtgatcgaacagacagagaagaatgcaagggatttatatcaattataagaaatggagagatgagatgaaagaaccaacacttggaaatccacagaatacgatagaagtattacagaaatataatttcgtattccagaaaaagttcggtcagaactttctgatcgatacacatgtactggacaaaattattgcggcagcagagattacaaaagatgattttgtattggaaatcggaccgggaatcggaacgatgacacagtatctggcatgtgcagcgagaaaagttgttgcagttgagattgacaaggcactgattccgattctggaagatacgctttcagattatgacaatgcccgggttattaacaatgacgttctgaaagtagatattgcaaagcttgcagaagaggaaaatggaggaaaaccgatcaaggttgtggccaacctgccatattacattacaacgccgatcattatgggactttttgagaatcatgttccgatcaagagtattacagttatggttcagaaagaagttgcagaccgtatgcaggtgggaccgggaacgaaggactatggtgcactgtctctggctgtgcaatattatgcgaaaccatatattgtagcaaatgtaccaccgaactgctttatgcctcgtccgaaggttggatctgcggtaatccgtctggaacgttatgaagaaccaccggtgaaggtaaaggatgaaaagcttatgttccgtattatccgtgcctcctttaaccagagaagaaagactttggcaaatggactgaagaattcggcagaacttgactacacgaaggaagaaatcgaggcagcgattgaagcactcggaagaggagcatctattcgaggggaagcccttacgctggaagaatttgcaaagctggcagattttctttatgattgcagataaaataatattaaaggaatttacaaagttgctgtttacaaaaatgtagtggacagcaactttattcttcttcactttttgattcataaagatttaatattcagttaattgtttactagacggatatctagtataattaaaagataaaagacattagaagaaacaagagaaggaggaagagcccatggccaaagatattaacagcatattttttaacatcactccggagattgaagaacttgctctgaaatgtgaaacgaacaatgcaattgacaaagaactctataccaaatacgaagtaaaaagaggacttcgagatctgaacggtaaaggtgtacttgccggattgacaaatatatccgatgtgtgtgcaacaaagattgtagacggtgtatccgtaccgtgtgcaggtaatctttattacagaggttacaatattaaagatcttgtaagcggattccttgaggcgaaacattttggatttgaggagattgcatatctgcttcttttcggggaacttccgaatcagaaggaacttgagaattttaaggatatgatagctgaccgccggatgcttccaccgaattttgtacgtgacgtgatcatgaaggctccgagccgtgatatgatgaacagtattacaagaagtattcttcagctttattcttacgatgacaaagcggatgatacaagcattccgaatgtactgcgtcagagtctgaacctgatcagccagttcccaatgcttatggtttacagctatcttgcttacaattataaaatgggtgaagacctgtatatttatgcaccgaagaaagaactgtctatggcagagaatattctgatgatgctcagagaagatcgtcagtatacagaacttgaggcgaagatccttgatatggctcttgttcttcatatggatcacggcggtggtaacaactcaacatttacaacgcatgttgttacatcttcaggaacagatacttattctacaattgcagcagctatggcgtccttgaaaggaccaaaacatggtggtgcgaacgtaaaagtaacacagatgtttgaagatatgaagacgcagctgacagactggcaggatgatgatcagatcagagcttaccttgaggcactgctggagaagagagcgtttgataagagaggtctgatctatggaatgggacatgcgatttattctgtatccgacccaagagcggagatcttcaagaagtttgtaaagcagcttgcatatgaaaagggccacgaggcagaatatgtactgtatgagaaagtagagaagatggcaccggagatcattagcgagagacgtaagatgtataaaggtgttaatgcgaacgtagatttctacagtggacttgtttatagcatgcttgatcttccaccggcattatatactccaatttttgcggcagcacgtatcgttggatggagtgcacacagactggaagagttgaagaatgtagataagatcatacgtccggcttataagccgcttgcaccatatcgtgattatatcaaattagatgacaggtagtgaatgaacgatgagagatgagttttatttcccttcaaaggatggcaatacggagatccacacgattgagtggaaaccggaaggagaagtgaaagctgtcctgcagttaagccatggaatggtggaatatattaagagatacgatgaatttgcagaattcatgtgtagtcatggatattatgtcgttggaaacgatcatttaggacatggaaaatctgtgcagagcaagtcggagtatggattttttaacgaaaaatatggaaatgcatgcgtgatcggagatatgcatacacttcgtcagcggacgatgaagaaatatccggatgtaccttactttatgttaggacatagcatgggctcaagtcttttgcgccagtatgtacagatgtatggaaatgggctggcgggagcaatgtttatcggagttgtagcagatcagcagagagcgacacttcagtttggaagaagattgtgtaggacactggcgatgttccgtggctggcattataaaagtaaactggtggatagaatggcagtcggtgcctataataggaaattcaagaatccaaagacacgcgcggactgggtaaccagtgatgaagaacatctggaaaaatatatttcagatccactgtgctcctttgtctttacagtgaacgcgtattatagcatgtttaccgggatgcttataatggagaaaaaagaaagtatctatatgattccgaagcagcttccaatccttttcgcagccggtgccgaagatccggttggaggattcggaaaaggcgtaaggaaggtttatgagaaatacaaagcggccggaatccaggacatcagtctaagactgtatgccggtgatcgtcatgaactgcttaacgagacagatcgggagcaggtatatgaagatcttctcaagtggatggaagaacgtagaaaaataaattattagtttatattttttcataatctgtttatattttttcgtattctttaagaaagcactcatacttttgacacattttccggatatactaatatcaagatagttgataagagaaaatcaattatcttcccccccctcataaagttgtgacacaggaaagtgtcaacactttactctcattcctttagataactataaacacaacgaagcccgttagccgaaaggttagcgggctttcgcgttgcagtgataacttagatgctgccagaatataggtggtgttatatataaaggaatcctgtacgacatcatatgaaaacacaaaaagtaagacccgagcacctcactgtttcaacagatcggcaatcgggtcttctttttattatctaaaggaatgagagtaaagtcgacatcccggcacaccgggatgccattactttatgaggggggagatagttgtttatcaactatctgagttttagtatagacagaaaatgtgtcaaaattatgttcaaacattaaaagaaaaataaattaaataaaataaacttaaccctgaacgcttacaaacacttcatagaccttcttgagtgatttatgaagataaggtttgtactcttccatagaaacaggtttctcatgaaggatacagttgtaacttgttgaactgatcaattcaattagtgtaaaaagtaagagatccggattctcacagtttacgttatattttacaagtgaatttctgtagtgatcataaaattgcctggacactacagaacctgttccgacagcatcctggaaaactccccaggagagattctttgacaaaaattttagcaaggactgctgtttctggaaacggtcaataatataatctgttaaaaaaagaatctcttcttctaaagaattaatctcagtttcttcaagctgcttgtgtgcatcatcaaaaagctgacaggctttgtatgcgatcaatttatctcttaaatcatacttgtctttgaaataaagatagaatgtcccctttgccagaccggcctgattcacgatgtcggatacagttgttttggcaaagccttttccggtgaacaggtcaaatgcagtctggagcagtgtattcattttcagctttttattatcatctacttttcccataatctcaatgacctcctttgtgtgtctttagtgagtgtaatatataatacaaactttgccaataagaggttttcataaaaatacattctgtgaaaaattcctattgtctttttactagtatggcacaaaattcccaaaagtcaataaaaatgactatttttcattttttaacaaaaaaatattgactaatggtcatttcgagctatactataagagacttgagtagtgagacagtataggagatgatacaaatggttaaagttggcaaatggattgccaaacacagagttctgatgttgatcatcggatttcttctgattatcccgtcggtcatcgggatggcaaagacacgtgtaaactatgatttgctcagttatctgccggagcatctggagacagtaaagggtcaggatattctggtggatgagtatggaatgggcgcgttctccatggttgtggtagagaacatggacatgaaggatgttcagaagcttgaagatcagttcagtgaagtaccgcatgtaaaagatgtactctggtatgacgatgtagctgatatcagtcttccggtggagatgatcccaaaggatttaaaggaggcgtttttcaaaggcgatgccacgatgatgcttgtattgtttgataatacaacatcttctgatgaagctatggatgctgtcggacagatgaggaagctggcgaatgatcagtgctttatcagcggtatgacaggagttgttacagatattaagaatctggcacttaaagaacttccggtttatgtggtgattgcagcacttttaagtctggtcgtacttgaactgacaagcggatctttcgtagtaccgattttatttctgatcagtattgggcttgcgattctttacaatcttggaagcaacatttttcttggagagacttcgtatatcacaaaggcattgactgcggtattgcagctgggtgtgacaatggattattccattttcctcttgaacagctacgaggaaaacaagaagcgttttccgggagagaaagaacgtgccatgggacatgcgatttccaatacatttaagtctgtggcaggaagctctgttacgacagtagccggattcgtagcattgtgcgttatgacatttgcacttggccgagatcttggtatcgttatggcaaaaggcgtattgatcggtgtgatctgttgcgtaacagttttaccttctctggttcttgtatttgataaaccaattgagaagacaaaacataaactgttgttcagcaacatggataagccatcagcttttattacaaagcactataaagtatggatcgttgttttcctggtacttttattcccggctatttatggaaataatcacacaaagatttactacaacatcgcagattcactcccgtccacactggacagtaatgtggcgaatgcagaacttaagaaagacttcgatatgagtaatattcatatggttatgttagatagaagtatggatgcaaaacagaagtcgaaaatgttcgatgagattgattctgtgaagggtgtcaagtggacgatcagtatggattcgctgattggaccggcagtgccggactctatgataccaaatgatatcaaagaaatgctgcaaagcgatgattacgagcttgcattcgtatgctcggaatatgaatcagcaacagaggaagtcaatacacagattgcatcgatcgataagattgtaaaatcttatgataaaaatgcgatggtaattggagaagctcctttgatgaaagacttggaggatgtaaccaatgtggatctggtaaatgtaaatgcactttcaattgcagcgatatttatcattattatgattatcttcaaatcaatatcactgccaatcatattggtggcagttattgaatttgcaattatggttaatatggcaatcccgttttatcagggaacaagccttccatttgttgcaagtatagtaatcggagcaattcagttgggagcaactgtagattatgcaattctaatgacgacccgctatcagaaagagcgtcagcgtggacgagataagatggaagcaatcagtattgctcataaaaccagtatgccgtcaattatcagcagtggattaagtttcttcgcggcaacatttggagtagcctgctactcacaggttgaaatgatcggttctatttgcactttgcttgcgcgaggcgcgattatcagtatggttgttgtaatcctgatattgccggcgatgtttatgatatttgacaaagtaatatgtaagacgtccatcggattcctcggtggaaaaaagtagaaaggatgtaagaatcatgaacaaaaacagaaaaatcaaacgtggactcacaacttctcttgccgttggaatgtcagtaatgatgggcgctgtgccggtctttgctgcaggaacaagttctgacgcagatgcagtttataaggaagagacagtttatgtaaatgcagacgcaacaggaacaattgatgaagtaacagtatctaactggctgaagaattcaggcagtgtatcaggaagtctgacagatgcaagtactctgaaagatattaagaatgtaaaaggtgatgaaacattcaaagcatccggagatacattgacatggaatacagacggtgaagatatttattatcagggaacaacagatcaggatcttccggtttctgtaaagtttacttactatctggacggaaaagaaatcaaaccggcagatctgaaaggaaaaagcggacatctgaagattcaggtggattatacaaataaagagaagaaaacagtcagcgtagatggaaaacaagaagaagtttacacaccatttgttatgatgacgggaatgatccttccgaatgaaacatttagcaatgttacgattgataacggaaaagttatttctgatggaagcaagaatatcgtagtcggattcggaatgcctggtatgaaagaaagtttgaatctggacgaaagcaaaacagaagatctgacaatcccggaaagtctctgcgtggaagctgatgtgacagatttcacaatgtcttctacatttacagtggcacttaccgatcttcttgatgacattgattttgataatatcgtagatgttgattcactgaagagttccttagatgaactggaagatgcagcacttcagttagtaagcgggtctgacacacttgcagacggagccggaacacttgcagacggtgtcaacagctatacagaaggtgcggatactttgaatgatgcaattcagaagtaccttggaagcaatggagaactgaacggaagcgtgacagagtatgtgaatggtgtcaataaagttgtcaaaggcgtgcaggattatacagacggaacaaatgcactggctgacggagtgacagcttatattggcggtgaacagcagctggcagcaggtgccgcgaaactgagccagctcagcagcggactgaaaacagtacagggagcaatcagtcagctgaatgcagcaattgatggagaaggcagtgcgacagaagatattcagtcagcgtcaagacaattggcagcaggtacagcacagcttaaggcatcccttggaagccaggaagtgcaggcacttttgggtcaggttgaaaacatgcttacaaccggaaatgaaatgatcgagcagacagagcagcttgaaacagcattgaatgatggaattgcagtaccggttcagaatatagcgggtaatttacagagtctgagtcagcagcttggagcaattaatcagcagcttgctactttggacacaacttgtcagagtgcagtagatgatttgaatgcgaagattgcagattacaataataaagtagatgcagcgcagagtgcagcaacaagcagcaaagcaactatcaattcagcaatcagtgaattacagacaaagaaagatcagacaacagatgagacagcaaaggcagatcttcaagcagcaattgataagctgaatgcggcatcaaatgcagcggatggactgcttggactggagaaggcaagtgaagtgtcagtgtcacttccgtcaattgacacaactccaattcagaaggaaatgggagagattgcagcatctatggaaacatttaaaaagactgcaaatgatctgaatgctcaattaccggaaatgaaagagaagttagagtctattacagctatgaagtcacagcttccaacagaggcacttggacagctgtccgcatcagtagaccagttgaacgcaggaatgcagggattgaatgcagcaatcggatccttctcatctaatctcggaacattaaatgagtctgtacaggcacagttcccggcagcagttacaggaattcttgaactgaacggcggattctcacagctgagtgcaaataatgatgcacttttagcaggagccaacaaactgaaagctaacagttcaacactggtagcaggagttcagacacttcagagcggaacaaaccagctggcaagcggactgaatacactgggaagccagatgtcatccggagcagcaaaactttcaatgaacagcgcagcccttcgtgaaggtgcagcaactcttcagtcaggagcaagagaactcgcagacggtatggagaagttcgaccgtgaaggaacaagcaaattaaagagcacagtagaagacgaactcggtgatgtacttgaccgtttcgatgcacttacatcggatgattgtacttatacaacattcagtggaaaagacagcggaatggaaggaagcgtgaaattcgtaatcgagacagaagcaatcgagtaaatcgtatcatctctataatataggaaaaacggagaaatccccgaccaggatttctccgttttgttactgttcacatgatgtgcgattagcaacgcatctcgccatcacaagaaaggattgcaaaaaataccattatatagtagtctgtctatagagatgcatattgaatgcacagtagaataagttgataatagaaattatggtatgtgaggaagagatggaaggaaatttaacaaagggtcctattttaaagaccttgacgaagctggcgataccgattatggcatcgtcatttttagggacattgtataatcttacagatatggcatggatcggtctgcttggttcgaaggcagttgccggagttggtgtcggaggaatgtatacctggctgtcacagggactggcatccatggctcgaatgggtggacaggttcaagtggcgcagcatattggaaaaggaaatagagacgaggcgaataaatatgcgcagaccgcagtacagttagctacattgatgggattagtatatgcggcaattgtattgctttttttacatcgactgatcggcttctttcagttggatgatgcagaagcaattgcggctgcattttcttatacaagaattgcctgtggtttgatcgtattttcatttctgacatttacgttgacaggtatttatactgcacagggagattcaaagactccatttattgcgaatctgatcggcctggtaatcaatatgattctggatccggtactgatccttggaccggggccacttcctgaattaggtgtggcaggtgcagcgattgcgactgtaacagcgcagggaattgtaatgagtgtgatgatcatcggaatctttgtgcagaagaaggataatgtattaaaaggaattcgtctgtttgcaagaattccgatggaatatgtaagtggaatctgcaagatcggaattccgacagcacttcagggaatggcttattgtgtaatctcaatggtacttgcacgtatggtatccgtctttggtgctgaggcagttgcagtacagagagtcggaggtcagattgaatcgctctcatggaatacggcggatggattcgctgcggcgctgaatgcatttgttggacagaactatggagccaacaagatggatcgtgtcaagaaaggatacagagcatctttatggacagttggtatttggggattgataattacagcaatatttgtatttgttccaaaaccaatcgcaagaatttttttccatgaagcaacagcaattgaaatcgcagtggattaccttatgatcgtaggactcagtgaagcatttatgtgcgtagagcttatgacggttggggcattgtccggacttggaaagacacatctgtgcagtgtgatttcaattatatttacaggagcgagaattccattggcaattctcctttgcagaacagcactcggacttaatggaatctggtgtgcagtttcatcgacatccattgtaaaaggtattatctttgtagcaacattcttctggattacaagaagttcaagaatacttaagaataatagcaggctttgattaagaaaagcctgctattattcttttataaaagatgatagttcaaggaagatattggaggaaaaatgaaaatagaaaaacaatgggaaaataatagaagtaaaatgatatcaaatattgtatttggagcatatctcttcttactgacatggcttgtgctgtttaagtttgcatttactatagaagaaatcccacatttaagacaactaaatctaatcccatttcattacgaaacaagtgttgcgtttataacacatatgaaagaggttatatacaatatactgatatttgttccggcaggagtttacttcactgcatttctgggtaaaagaaaatggtggttggggattggagcatcattttttgtgagcctgacatttgagacagtacagtggatattctctattggcgtaagcgatattacagatttaatcggaaatacacttggcagtggggtgggagcagtgctctttgcatttcttggaaaaatattgccaaagaagagaatgagcatgatcaatggaatcggagcagtggttgaggtggtcggaattgcattactgagtatgctgtttgtgacaaataagtaagcatgcaatattcgtagcatttgggaacgcagtttacgcatttgcaacaaccgaaagaactgacgtcctttcggttaagggcattcgccctatgttccccacccctatcagcttactgcaagcaagcttgcaatagctgttagtgtttgggaacgcagtttacgcatctgcaacaaccgaaagaactgacgtcctttcggttaagggcattcgccctatgtttcccaaccctaccagcttagtgcaagcaagcttgcaacacctgctagtgtttggaaacgcagatgctaattttcagaatattctgaattgcatgaaatatataaaaaacattgacaattaaaaacggctgtgttaagataacattcgtcgctgagaacggcactgaaaactatagaacgaaagcttactttagaggaaggcgcggaggcggacagtccctgaggaaagaaagttcaaaagagcagcttataagaagaactaataaaaacttataagaattgttaaaaagtggttgacagaaaagtttgaatgtgataacataaatgagctgtcgaagagaagtggatgagtgactcacaaacagcaaaagaaaaataaaaaagttcttgacaaagacaaaggcttttgataaaatataaaagctgtcgcttgaaaagaacgacacaaacaaagaaccttgataactgaacaatagacaacaacaacccttgaaaatttctttaagagaagatttttaagaacggtttttaacaaaccaaaacaacagtaaaaagggaagaattagctagttagttgattctgaactggatacaaacacttttaacgagagtttgatcctggctcaggatgaacgctggcggcgtgcttaacacatgcaagtcgaacgaagcaccttgatttgattcttcggatgaagatcttggtgactgagtggcggacgggtgagtaacgcgtgggtaacctgcctcatacagggggataacagttagaaatgactgctaataccgcataagaccacagcaccgcatggtgcaggggtaaaaactccggtggtatgagatggacccgcgtctgattaggtagttggtggggtaacggcctaccaagccgacgatcagtagccgacctgagagggtgaccggccacattgggactgagacacggcccaaactcctacgggaggcagcagtggggaatattgcacaatgggggaaaccctgatgcagcgacgccgcgtgagcgatgaagtatttcggtatgtaaagctctatcagcagggaagaaaatgacggtacctgactaagaagcaccggctaaatacgtgccagcagccgcggtaatacgtatggtgcaagcgttatccggatttactgggtgtaaagggagcgtagacggagtggcaagtctgatgtgaaaacccggggctcaaccccgggactgcattggaaactgtcaatctagagtaccggagaggtaagcggaattcctagtgtagcggtgaaatgcgtagatattaggaggaacaccagtggcgaaggcggcttactggacggtaactgacgttgaggctcgaaagcgtggggagcaaacaggattagataccctggtagtccacgccgtaaacgatgactactaggtgtcgggcagcaaagctgttcggtgccgcagcaaacgcaataagtagtccacctggggagtacgttcgcaagaatgaaactcaaaggaattgacggggacccgcacaagcggtggagcatgtggtttaattcgaagcaacgcgaagaaccttacctgctcttgacatctccctgaccggcaagtaatgttgcctttccttcgggacagggatgacaggtggtgcatggttgtcgtcagctcgtgtcgtgagatgttgggttaagtcccgcaacgagcgcaacccctatctttagtagccagcggtttggccgggcactctagagagactgccagggataacctggaggaaggtggggatgacgtcaaatcatcatgccccttatgagcagggctacacacgtgctacaatggcgtaaacaaagggaggcagaaccgcgaggtcgagcaaatcccaaaaataacgtctcagttcggattgtagtctgcaactcgactacatgaagctggaatcgctagtaatcgcgaatcagaatgtcgcggtgaatacgttcccgggtcttgtacacaccgcccgtcacaccatgggagtcagtaacgcccgaagtcagtgacccaaccgtaaggagggagctgccgaaggtgggaccgataactggggtgaagtcgtaacaaggtagccgtatcggaaggtgcggctggatcacctcctttctaaggaagaaatgctttctttcgtctggaacaatccaactaaaacggaagaaagaagtagagagtttttactgttgtctattgttgggttatcaagtaaccaaagcttttggtggcgatgcgcttaggggtaacacccgttcccatcccgaacacgatggtaaagacctaagcggccgatggtactgcactggagacggtgtgggagagtaggtggccgccaaattaaaagaaagaaactaaggcagagacgctgccgaagttgaacatatagatacaggcaaagatgagcaacaacttatcaccgccaacccaatcagcagggcagtgctgttatgatagctggtttcaccagtgattagatatacaaagagatttgtgtatgtaatgactgatgaaaatatcagtcggatgaagaactgaataagaacttcatcttatgtaccttgaaaactgcatatagtaaaaatcaatagatttagataaatatctaatcaagacatccgaggtaatgttaaaaacattaacttacagtctgaagaaaacagacttaaaataaattgactatcaccaacgcatacaacgctatgtatgtgtggacattatcccattcccgtgggatgaggtcgagttggttatgctgataagagcgtatggtggatgccttggcactaagagccgatgaaagacgtgataagctgcgaaaagcttcggggaggagcaaatatcctttgatccggagatttctgaatggggaaacctacttgagcaaacctcaagtatccttaagccaatacataacttaaggaagggaacccggtgaactgaaacatctaagtagccggaggaagagaaaacaacatgtgattctgtgagtagcggcgagcgaaaacggaagagcccaaaccagcgtgcgtgcatgctggggttcggaccgcggaattgattcaacgagtttagcagaacggttttgggaaagccggccagagagggtgaaagccccgtaagcgaaagacgagttgacatggcgggatccagagtaccacgagacacgtggaaccttgtgggaagatgcggggaccaccccgtaaggctaaatactacttagtgaccgatagcgcatagtactgtgaaggaaaggtgaaaaggaccccgggaggggagtgaaaaagaacctgaaaccatatgtttacaagctgtggaagagctttatatgctcaaccgcgtactttttgtagaacggtccggcgagttacgctggctggcgaggttaaggactaaaggtccggagccgaagggaaaccaagtctgaatagggcgcatagtcagtcggagtagacccgaaaccgggtgatctatccatgtccaggttgaagttgccgtaaaaggcaatggaggaccgaacccacatccgttgaaaagggtggggatgaggtgtggataggggagaaattccaatcgaacccggagatagctggttctcctcgaaatagctttagggctagcctcatacgagtcttgcggaggtagagcactgaattcctaagggggcgtcaaagcttactaagggatatcaaactccgaatgccgtgtagatgatgtatgggagtcagacgatccgagataagttgggtggtcaaaagggaaagagcccagaccaacagctaaggccccaaaatgtgtgttaagtggaaaaggatgtgggatttcgaagacaactaggatgttggctcagaagcagccattcattcaaagagtgcgtaatagctcactagtcgagaggtcctgcgccgaaaatgtccggggctaaaacacactgccgaagctttggaattgagaattcaattggtagaggagcattcttaaagggatgaagcagtaccggaaggagctgtggacttttaagaagagagaatgccggaatgagtagcgagaggaaggtgggaatccttccggccgaatatctaaggtttccagagtaaagctgatctgctctgggtaagtcggggcctaaggcgaggtcgaaagacgtagtcgatggataacaggttgaaattcctgtactatcctgtaacagaactgtggggacacaggcagagagcgtgagccgggaatggaaagaccggtacaagcgaggtaggagaagagttggcaaatccgctctttaatctgaagacgtgatgtggactgaaaataagtagggaagcacgtgagctgactgtcaagaaaagccgctattgtttgcaggatacccgtaccgtaaaccgacacaggtggatgaggagagaatcctaaggccgacgggagaagcattgttaaggaactcggcaaaatgactccgtaacttcgggagaaggagtgccagtaagatggccgcagagaattggcccaagcaactgtttagcaaaaacacaggtctatgcaaaaccgaaaggtgaggtatatgggctgacgcctgcccggtgctggaaggttaaggggagaggttagcgcaagcgaagctttgaacttaagccccagtaaacggcggccgtaactataacggtcctaaggtagcgaaattccttgtcgggtaagttccgacccgcacgaaaggcgtaatgatttgggcactgtctcaacaatgcacccggtgaaattgaaataccagtgaagatgctggttacctgcgccaggacggaaagaccccatggagctttactccagcttgatactgggattcggtattgcatgtacaggataggtgggaggctaggaaatggtaacgccagttgccatggagccaatgttgggataccacccttgcagtactgggtttctaaccagcagccgtgatccggctgggggacaatgtcaggtggggagtttgactggggcggtcgcctccgaaagggtatcggaggcgctcaaaggttccctcagaatggttggaaaccattcgaagagtgcaaaggcagaagggagcttgactgcgacaccgacgggtggagcaggtacgaaagtaggacttagtgatccggtggtataaagtgggattgccatcgctcaacggataaaagctaccctggggataacaggcttatcactcccaagagttcacatcgacggagtggtttggcacctcgatgtcggctcatcgcatcctggggctgaagtaggtcccaagggttgggctgttcgcccattaaagcggtacgcgagctgggttcagaacgtcgtgagacagttcggtccctatccggcgtgggcgtaagatatttgagaggagctgtccttagtacgagaggaccgggatggactggccgctggtgtatctgttgtcttaccaaaggcatagcagagtagccaagccgggaagggataaacgctgaaggcatctaagcgtgaagcccccctcaagatgagatatctcataacgtcaagttagtaagaccccttgaagacgacgaggtagatagggcagaggtggaagtgtggtaacacatggagctgactgttactaataggtcgagggcataaccaaagcagtgataggtttggatgatgatgttggttttgactgtatgtagttttgaaggtacatggaatatagacaggaatgagaagcagtgcgaaagcactgttttttttgcaataacttccatagaacgaaatgtattaagatatcagattgatagatacaacaaccaacttgatgtattttaatatcgattgaccatatttaacgaatattgctaaaaagcagagcacaagctgttttttgtttgacaaatcactcctttgtggtctaatatacgactcataaagaatatcaattcgttttgaggagtagattattattatgaagatgtggaaaaaagcagcaagtgttaatccagaattaattgataaaagagaaaatttatcagttgattctgggttatttttttggggtaaaacacgtaacttcttgaaatagtgttataaatcttgaaatagtgttataaatcttgaaaatttaatattcattaaattggaaagttttgttaacatagtgttaagaaacaaatacaagagattaccgatagacagcagaggggagacagaaattatattatcgggttatgaaaagggatggagttcgaaaaatgagaggaaaggcaaaacagagagttagtctgatacttgtagtgacaatggtacttggaacagtattaacaggaaatactgtatttgcagcaggagagagcagtgacgaacaagatcggataaaaattaatatttctaaagattctgaacaaactgtggaacagaatgttacacagacaattcatgtgactgcgcaggggcagtgctcgcaatcagtctgtctgaatgtatatctaaaaaacgaggacggatctgcggcaacagatatagatgcagtcaatcttctgacaagcgatcagcttacagataaaaacacacagaaaacaatcgatgagacattgaaagattcagtgactcttaataatggaacaaaggcaagtccaacagcagagtggaagaacgacaaggacgataatggaagagttacttctaaatatctgcagattacaatgccaacagatgcaacagcaatcaactttgatatgcagcttcagtatcgcacagatgaagcaagctatacgaagaaagtgctggttgaggcgaaggcattcgaagaggagcaggatatcacagaagcagctaagagagcagacgagagcaaagagaatgaagcgacagttgtctgggaaggtcaagcagtaagtcaaccagaaagcgaagctgcggatgaggacgcggacggagaaaataatattaatacggtgtcagaaacaggaggatatacattgtattttgagcaaaatacaatagatgaccctgactctgcttgggataatgcaacacaaatttctgtatatgcatttaatagtaatgatgacaacacgggcgttctgcagatgtataaagtatctgaatcagattcaaagaatatttggaaaatcatgtttgataagaaatggacacaggtaatctttttaacaggtaacaactgggatggtgtttctaaccaaacagaggatatacagattgattggagcctgaattcaccatgttataaattgaaaggtgaagctgcatcggataataaaaagaaagtagatactccgtttgagtacaaagaaacaccacttgatgcagatggaataacagtatattacgatgccacattatcaaaattgtcttatgaggataataaaaaaggaattccaaatccagatagtactgtttattattatgctacaaatggtactaaatctactgaaggaaaaatgaccaaagaaaaaaagaaataaatggatatgattataacgatgtatataaagtcactcttccaaaaggatatgggaaaatacgatttgcagcaaatccggtatctaatgcgaatgatgcaagtaatggtgaagcaactgagctattggatattccttcaccttcagttttaacaaatccatgttattacggtgattcaagtgataatgttatctacgataggggaaatcgtggtggctactgggaggaagcatatacagtaagagatgcagaaacaggaaagggtacgacggttgtagatgtaccgaatgaagtagaaaaaagaaatgaagatgaattatatgtaaatacaacgatttacgattattattcagattatgaattgaatggtttaaatagagacaactatcaatccaatattccagtgaatagtcacagaatttatcagccattccgtcagtttaacatggcagtgagcgattattatcaagtaaatggtgcaacatcaccattatactgggggaacttccagaactataatgacgcgacagactttaagaacattgctggaacaatgaacttatttggttatcctaattctaaagatgattcaaatttatatcaaaaattcttttacgaaaataactccatgtggggaagtgatggaaacaagttatcaagtggaaataatgcaacccagggattggttgcagatcagttaaataataatagtctacaattaaaaacagacagtggaacggcattagcaccattttttgataaagattttttaaatggaaataattcgaaaaataccgtacttggaaaagtatatgaaaatgtaacatttccatttgtaaaaaaggcaatgcgttcatcaagtacagagtcaacaggaacgctagattactggtattttaatagtgctgataaagaggcaactaacaaaaatcttcaattaaaatatgatgctacagatgaatatttcttgcaatcaaataatgaagaggtaaagggaagtacaacgaatggagcaactgcgaatggaaattattttccactaaattcaaaagagcaatcaggtaaggcttcacaattgaactacggattcggtcaaaagttcgatttgaagttccgacttacatcggatggaaaggttcttgattctgccaataaggaagtgccaattgaatttaacttttccggtgatgatgatgtatgggtattcatcgatggccaactggttcttgatattggtggagaccatgctgtggtaacaggaagaatagatttcgcaaataaaaaggctacggttagtagtgcaaagaactccagtttaggaggcacctctaacggagaagtagagaaagattttcctaaagaattagacacaaacaattatttcacaaaggaacatacactcaccatgttttacatggagcgtggactttgggaatcaaatatgcagatcactttcaacttcccacaggagaataagctcactgtagagaagaaagttgatacatcaggagcaaatgagattttcaaagatgccttagcagatgtcggaacgtttgactttgaaataaagaatcttgccacaagtggcacatctaaagaagtgtcaaagcctagcagcccggagaaaaagcaagtattcaataattatacaaatcagagtagtatttctggaacaggagtgaagaattcaagtgttgaagtggttgatgattctacgggtaacggaaaaggaaagcttataagcagctattatccgggagagaagaaatcaacggatacgcaagaaaaaacagattcgagattagtaaagattcaggcaagtattgaaggtacatttgacgcatcagattcaaaaggttacaagtatttgcaatttgatgtgtataatacggatgaaaatgcgtcagggacagatccttttgttgcactggtagatgaagatggaacaaggataggagcgtgggcaagtttccttacttataatggtcgaaataataatattgataataaaatttggaagacaatacgaatcgatcttaataaattaaaggaaaaaacattagacgagggaacaacaagtggatttgacttcagcaaagtgaaagaaatccaatttgcttactgggatgatgtgacagtttatcttgacaagtttgcatttgtaaagccagcgagtgtcgagaaaacaggattcacaacagaacaggaagatattccagattatggatcaattgaatcaaagaagctggaaccggtgaatggcgcatattatcagaatacaaatggagatacaatcatctacagtgatggacttcttagtattggaaataaagaaagtgcaatattcagcgatcagttccgaagaggaagttatctttccattgccgagaaaaatgtttcatctgatgtatttactacaacatggtcattgtatgaaaatggaatgattgtaaatccaggttatttgactcctacaggttctactacagtaaccggtaacggacaaaaatctgttgaaaatcaatcaggatatgcggtaaatgatggaagaacagagcagaatgagatagtagggaaacctaatgaatcaacgattgtattccgaagttatgcaaatcctgatagtgttactgcagtgattgatctgaaagcaaaatatgtaaataagctgcggacaggatccatttctttgaaaaaagagttaagtagtggagagaaagaatctaaatctggaagaaagtatcagtttaaaatcgaataccgaaatgttgcaggaatgaaactggaagcaaatatgggagaagctgttattacgcagacaattgaattggaagcgggaaaagaaacaacaatcagtggtattcctgcaggaaccgattatacaatttacgaagtaataccggatagtgccgattatagtctggaaaaagtgaatgttacaaatgctggaaatgacaagaatgtcaaagcagagaacaatgtagttacaggaattgtagttgcagatgatggtgacaatccaactagcacagaggttacatttgtgaatacggttacaccattgatttccatttctggaacgaagacttgggaaggcggagagacaaaagatacaccggataacattgttgttcagattcagcggcttaatccagatactaaagaatatgaacaagcaaaagataagttaggagaactgattccaaatcaagttgttgatattaatagtgactggaagtatacatttacaggattattgaaatatgtgaattatacagcgactgataaacaagaatgtaagtacaaggttgtagaattgggaactttaagaagttcggaggaacttggtgacgtgacaccggatccacagaatccagcacatataaagccaatagcaggatattatccggaatataaagatggcagttttgatattacaaataaaaaaactggtacattgaaaattataaagaaaaccggaaaaaatgacttcttaaaaggtgcagagtttacgctttatacagattctaatacagcgaaagttgcgagggattattcaggaagaaaactgacaggtactactggagataacggagagttagtcttcgataatattatagctggaacggaagaacatccgattacatattatctgaaagaagtaaagacaaaagccggttatgtgctcttaaaagagccgattcagataacacttccatataagtataatgcgggagatatagtgaatggaaataaagtaacgaaaagtggtgtgacatggaaccttacttacactatcattaatgataaagcattcgatcttccggcaagtggaaataaaggaattttcaaatttatcgtaatcggaattacagcagttctggtaggtggttacttgttaacagcaagaaagaaaagcagaaagaagagagtttcaaggagaggctaaaagaatcaatgaaccagtattcgtagggaatagggagtccctttgaatagatttagaaaaaaagaaggagaagagagcaatgaagaaaaatgttttgaaaaaatttgcggcggcagcacttgcggcggcaacagtaatgagtagcatgtcagtgatggcgtttgcagatgatacgggagcgacagcaaaaacaggtagtgttacgattacgaagtgtgaaagtacagaggatggatatgaaacgcttaacccaaattatggagcagctcaagatgtgtcagcaaaagaaaagttaaaagatgttgagtttgcatatatagcagttggagatcgtgagcaggtagacgtaaaagatgctactggtgaaatgacaacagagatgctttatacattatcaaatgaagcagttaaagcattagaattggaagaatctgatcaaataacagaaaatagcaagatatattacagaatgtctaccttaaataaagctatcaaaaacaaaaaagatgatgtgattgctttggtgaaagataaaacaaaagatcatacaggagctaatacagaagaaacaggaaaaggaaaaacaagcggagatggaacaattaagttcgataagctgtctttagaaaagttatatctctttgcagagacaaatgcttcaggagcaacgaaagtagatggtacatcagtagcagttactaaagtatctgttccgttctttgtatcacttccatttacagataaagatggaaattctgtaaaagatatttatgcatatccaaagaactcaacaggtacagctacaattgataagaaaattgtggaaaatggaacagataaagcaacaacaactgctaatatcggagatacaattaattacaaagtaacttatagcattccggtaggtgagaatggattagagtctttagttgtaacagatacaatgagtaaagggttaacatttgtaaataatccagataatatcaaagtattaaatggcaacgaagaagtagataggacaatgtatactgttaaggatagtaaagatgattctacaaaagttacaactattacaattacatttaacagtgacaaatattgcaaaacattagacccaaatacaacacagaactttacaattacatatacagcaacattaaacaaagatgcagttcttggacagagcggaaatacaaatgatgttttcgtaacatatagaaatacaggtgatgttgacagagatacagagcataaaagcactactaaagtattcacatacggaattgaccttctgaaaaagggtgaaggtgtagataaacttgtaggagtaaaatttaaattaacagatggaaacgataaggtagtaagtgttgagaaaaaaggaaaaaatacattctatacaccgggcggagattcaaatgaagtagaaacaggcgccgacggaaaaatctacatcagaggtttaaaaccaggtacatacaaactgacagagacaaaaacaaacgcaggttatgtacttctgaaagatccagtagtgattgtgattaaagaggataatgcaataggaggagcagaagcaactgtaggcagtaaacctgttacaatgcagaacgatcagaagaattcaggcagcaaaacagccgaagtaccactcacagtagtcaacagcaagggatttgaccttccggctacaggcggcagaggtattgcactcttcacaatcgcaggtatcgcaatcgttgcagctgcaggatcactcttattcatgagaaaaagatccaaataattaattagatgctctcatatacataattaatactacacagggaaacagaaatgactgtttccctgtatttgaaagtgagaaagcacatttcttgttttcaaatacagggaaggagcaggaaaatgaaaaataaaataattaatatctttcttgtgctgattctgctttgtggaatcggcgttttgagttatccgtttatcagtaatatattacaggatagaaaacaggatcagattcttacagaatataatgaagagatggagaagctgtcagatgcagagattgaggatgcgaaagaaaaagcaaagcagtacaatgacagtttgagcaatacagttgttatatcggatccatttgatccggatgcggcagatgatatgtcagcagattatatttcagcattgaatcttgagaaaaatggaattatggcgtatattgagattccaaggattgatgtgtatgaacctgtgtaccatggcacatcagaagaagtgttagcaaaaggtgttggtcacctggaggggacatctcttccaattggtggagagagtacacatacagtactttccgggcatacaggacttccggaagcggaaatatttacgaagctggaatctgtaaaagaaggggatatttttcttattcatgtgctgaatgagacattggcatataaggtggatcagattaaggttgttgagccatcggaaacagatgatttgaaaatcgttccggggtatgattatgcaacattggtgacgtgtacaccttatgggattaattcacatcgtcttttggtaagaggcattcgaacagaatatacgcaggatgtgagtgatgaggcagcaggacaggcagaggaaggtccggatggcggtggctggaaagcaatgtacgaaaaagccattatagaaggcattctttttgcagtgattctggttgttctgatcaatgtgattgtgcgcaagtttgggaaaaagaataaatcagaagttgcgatttatgatgaaaaagagaagaaggaaaagaaaccatgcaaaaaagcaggaaaaagaaggagaagaaaaagcaaaagaacagaacgctgatggcgattatgctgataattctgtatcttggaggtttgtttgtgtatgcaatcccagatttgcagaaggttgcattgcagaaggagaacgagaaagcagtagcacattttaaagaagaggtggaaggaagccagcaggataaaagaggtgaagagacagactccacctctgccgattccaatcagatcccaaagaacgcccagctctaccaggagatgcaggcatataatcagcagatcttttccgatggtcagtcaggactgactgatccgtggtcttacgagcaggagacattggatctgtcgaagtatgggattgatgacgggatgatcggaattcttgatattccgaagatggatgtgacattgccattatatctcggcgcaacgcaggagaagatggcgaaaggtgcggtcatgcttggacagacttcatttccggtgcagggcacggacagtaattgtgtgatcgcagcgcacagaggatggaaggggattccgatgttccgcgagattgagcggttggagatcggagatgaactgacgatacaaaactgtcaggaaacattgacgtatcgtgtgtcggagattgaaatcatcctgccggatgagagtgacaagatcatgattcagccggggcggaatatggtgactttgatgacatgtcatccttatacgcagaattccagaagatatgttgtatattgtgatgaggttggaacacagccggaggcagcagttgatgcagcagaagaggcggacagcagccagcaagagattatcaccacttccgagcagaacagaacggaagcattagaggaagatcagcgtctgattgagagagatacgttatggaggaaagccggttatgctggaatcgggctaatcggagtattaattatttttggatttatccctaggaaaaagcattgagatgcgttatactaagaaagatgtgaatgaaaacatggtacaaaggagatggagcaatgattcgttttacatggtatgaactgctttggctgtttttcatctattctttcttaggatgggtgctggagacagcggccgcaacagtaaaacagaagaagtttgcgaacagaggtctggtgaatggaccgttctgtgtgatctacggtatcgccgctctgttcatgacatttggattacaggagctaagaggagtctggctttttttatttgcgacgatttatgctacagtgatcgagtgggttgcaggtcatttgatcgagaaggcatttaaagccagatggtgggattactccaagatcaaatggaatctggacggatatatctgtatcccggcttctcttgtctggggtgctcttggatatctcggaatccgctggggaaacagatttgcaatcatagtatttaaaatgttgcctctgttcctgatgaagatccttgtattggttcttcttggcgtattggttgtggatatcctcggatcttatctgctgcttcgtggaaaagggaagaacctcgcgcggtgggaagctacgaatgaaggtctggataaagtcagcaataagcttggaagtgcgatttccggatgggttgggaaacgtatccaaaaagcgtatccaaaagcgaggaaactgatccgcaaggaagaggaatcggagaagggaaaagtatttgccgcaggctgtgggttctataagattgtgctgttgttctttgttggagcatttcttggagatattacagagacgattttctgcaggatcacggcaggtgtgtggatgagtcgctccagtgtggtctggggaccgttcagtattgtctggggactggcgatcgcacttgtgacagcgatgctttacaaatataaagataagagtgacagcttcttatttatcatcggtacattgctcggtggagcatacgaatatctttgtagtgtatttactgaaattgtattcgggaaagtattttgggactatagcgagattccatttaacttaggaggccgaatcaacttattatactgcttcttctggggaattgcagcagttgtctggtttaagaagatctatccgtacatttccgcatggattgagaaaatcccgatgctgacagggaaggtgctcacctggtttttgatcatttttatggtctgcaatgtggctgtgtcatgtattgcacttgttcgttatgacgaacgtggaaagggcgttgtagcggaaaacagcattcagaaatgggcagatgagcattacgatgatgcgaagatggagaagatttatccgaacgcaaaagcgacagaatagaaaataagatgtaaacgagagggaaatggtatgatggagaataaaaagatgcgggcagagcatccgaagaaagagcttgcagtggatattttgtatgatattataggaagtattttgtttggtgccggaatctatacatttgcagagggaggaaattttgcgcctggaggaatttcaggtattgccttgattatgaacaagttatggaatcttccggtcggtacaatgacgctaatcctgaatattccactggtcatcatcagttacaaaacagtaggaaagcggtttttgatgaagactgcgaggacaatgattatttcaaccatttttgtcgatcttgtatttccgatgttcccatactatacaggacagcgtctgcttgcagcgatttactcgggagcattgcttggacttgggatggttcttttctatatgagaggttcttcttcgggcggagcagatttcctgacgatgacgatcaaaaagaagagaccacatatgtctcttggtcgactgacgttgttgatcgacttgatcattattttaattggatggccggtattcggtgatgttgactcagttctttatggattgatcgcagtatttgtctgctctgtggtaattgacaagattctttacggaatcggtgcaggaacacttgcaatcattgtcacatcgaagggagaggaaacagcagaagagattggaagaatcaccgaccgtggtgtgacatctttggaaggaatgggtacttatacaaagagtaagagaaatgttctgctctgtgcatgttccaagtcagaagcgtatcttgtgaaaaatgcagtttaccaggtagatgactctgcgtttgtaatgttcactgagacgagtgaggtgcttggagagggattcaaggaaagtcttgatgagctgtaaataaaagagaagaatatgaaatagaaaaagctgctgtctgaactgttgcttgcgggactcgtgaacaacagacggacagcagcttttctatatgttctttatgcagaaattcgttttcaaagatataaaaatgttaatcttctttcgcccagtcgaaggaatatttgacagccttgtgccagcctttcagtttcttttcgcggacttccggatcaatcgaaggttcaaagatctgatcgatcgcccagttctctttgatttcttcaagactgttccagtagccgactgcaagaccagccagataagcagctcccatagcagtcgtctcaacgcagaccggacggtggacaggtgcgttgatcagatcagcctgtgtctgcatcaggaagttatttgcgcttgcgccgccatctactttcagagaggcgaggtcaatgtcggaatctgccttcatggcagtcaggacgtcatatgcctgataagcgagagactcgagggttgcacggatgatgtggtatttatttaccccacgtgtcaggccgacgatcgttccgcgggcatactgatcccaatatggagcaccgagtccggtgaaagcaggtacaacataacagccgtttgtatttttcactttctttgccatatattcgcagtcgtctgcggagtcaatcaggcgcagttcatcacgcagccactggatcgctgcaccggcaacaaagatagaaccttccagagcatatgtaacctttccgtcaagtccccaggcaatcgtggtgaccagcccattgtcggaaaagacaggcttctctccggtgttcatcagaaggaagcagccggttccgtaagtattcttcgcatctcccggtttaaagcaggtctgaccgaaaagtgcagactgctgatctccggcagcaccggcgatcgggatcgctccgccgaggacggaaggatctgtctctccgtaaatgcagctggaaggcttcggtgtcggaagcatacagcgtgggatctgaagttcttcgagaatctcgtcatcccagtctaatgtattgatattgaaaagcatggttcgtgatgcgttggagtagtctgtaacatgtactgcgcctttcgtcagtttccagatcagccaggtctctactgtaccaaagagcagttctccgcgctcggcacgttctcttgctttcggaacgttgtcgagaatccagcggatctttgttcctgagaaataagcatcaagtacaaggccggttttctgacggaacttttctgtcagtcctttttccttcaaagaatcgcagaattcagcagtacgacgacactgccagacaatcgcgtggcagataggatcgccggtatttttatcccatacgatcgttgtctcgcgctggttcgtgataccgattgcagcgatgtcagaaggttctgcgccgatgatgttcatagcctccacagcaactccgagcatgcttgcccagatctcgtccgcatcgtgctcaacccagcccggtttcggaaaatgttgtgtgaattctctctgtgtgacgctgcagatttccccttttttattaaataaaatgcagcggttacttgtggttccggcatctaatgccataacgtattttgacataatatgtgcctcctcattctagtattactcagaacagaaatggttactttggcttgaatgcatctcgccccatcgccaaaggcgatttaaaatggcgagatgcgttgctggtcgcacatcgtgtgaacagtaaccagaaatgtgataatcgaggttcgttctgttctatattctaataagataagaatatcataatcggaaggtgggttcaatggacgaaaggtgctgtaataactaaattttcgcattctactgtattttactgtatgcatgcttgcaaatctttttgtgataccgtaaaataaattttgaattgcttttcagcagttcgccttatgcaactaataacgatacagagacattagaaagttttattttcttatgcattttcataataagaaaggcggtatattccatgggaatgatacgtgctgaaaagcttgtatttgaatatgataaacgagacgaagaaggtaatgtgatcggatcccatcgcgccattgacggagttgacattgatgtcccgcaggggtcttttgtggcgattcttggacacaacggttcaggaaagtctaccctggcgaagcatatgaatgcgattcttgtcccgacaggtggaacgatgtgggtggacggaagagatacgaaagatccgaatgagctttggaacatcagacagagcgccggtatggtatttcagaatccggataaccagattatcggaactgttgtggaagaggaagtaggattcggtccggagaacttaggagttcctacggatgagatctggaaacgggtagagaacagtctgcgcgcagtcggtatgctggagcgaagaaaggattctccgaataaactgtccggaggtcagaagcagagggtggcaatcgcaggagtgatcgcaatggagccgaagtgtatcgtgcttgatgagccgacagcgatgcttgatccgaatggacgaaaagaagttattgaagcggtagagcagcttcgaaaagagaagaatgttacggtgatcctgatcacacattatatggaagaagtgatcgatgcggatcaggtatttgtaatggatgaagggcatgtggtgatgcatggtacaccgaaagagatcttcagccgggtggatgaactcaagaagtaccgtatggatgtaccacaggtgacaatgctggcagacgcattgattcaaaaaggagttccgctgccgaaaggaattcttagaagggaagaattggtggatgccttatgtcaattaagttagaaaatatcagttatgtatatagcccgggaactgcatatgagcatcatgcgctgaaggatgtcagccttgagatcccgcagggacagttcgtcggaatcattggacacacgggttcgggaaaatcaaccttgatccagcatttaaacggtctgatgaaagcaacctcagggaaattactttatgagggacagaacatttacgaggacggatatgatatgaagaaactgcgtacacaggtaggacttgtgttccagtatccagagtatcagttgtttgaagttgatgtgttaagtgatgtgtgttttggaccgaagaaccagggactttccaaggaagagtgcgagaagcaggcaagagaagccttggagcttgtaggatttccggagaaatattataagcagtccccatttgaattatccggaggtcagaagcgtcgtgtggcaatcgcgggaattcttgcaatgcatccgaaggtacttgttctggatgagccgacagccggactggatccgaagggacgagatgagatcttagatcaggtaaaattgcttcatgagaagaccggaatgacagtaattcttgtttcccatagcatggaagatgttgcgaaatacgtggaacgcctgatcgtgatgaatgatggagagaagatgcttgacagtgcaccggaagaagtgttccgccattataaagagcttgaggctgttggactggcagcaccacaggtaacatatgtaatgcatgatctgaaagaaaaaggatttgatgtatcagcagatgcgacaactgtggaagaggctgcggacgagatctacaacttcctgaagaagagacaggaggtgcagtcatgatcagagatattacgataggacagtattatccggcacagagtccgattcacagactggatccgcgtgtgaagattgtctgcacactgatctttttgatttctttatttgtgcagaacagtgtgcttggatatgcattggcatttgtatttcttgcgtgcatgattcacgtttctaaagtcccggcaaagtttatcggaaaaggacttaagccgattgtgatcttgttattgtttacagtggctatgaacttgttccttacaagaggcggtgcagtgttattccattggggaatcattacgatcacagagacaggacttcgtacttctgtgtttatggcagttcgtcttgtattgcttgttgcaggatcttctttgatgacatttacaacgactccgaacggactgacggatggactggagaagctgcttcatccactgaaccgaatccatgtaccggtacacgaaatttcgatgatgatgtctattgcactgcgttttattccgattctgctggaagagacagacaagatcatgaaggcacagatcgcaagaggagctgattttgaatcaggaaatattatccagagagcaaaggcaatgattccaatccttgttccgcttttcgtgtctgcgttccgaagagcgaatgatctggcgatggcaatggaagcccgctgttatcatggtggcgaggggcgtacaaagatgaagcctttgaaatatcattatcaggacagacttgcttatgcaatcacattgggatatctgatcgcgattgtagtgattggaagatttgtgccgtttaaattgtggattttttagaataaaataaatagagaagagggacggagatttctgtccctttcgttttacaggagaatatatatgagaagaatcagattgagagtggcgtatgacgggacagcatactgtggctggcaggtgcagccagaagtgccgacgattgaaggtgaattgaatcaggcaatctccagacttacgaaggaagagattatcgtgatcggggcaagccgcacagatgctggagtccatgcgaagggaaacgttgctgtatttgacacagagtctacaatcccggcagaccggtttgcttatgcattgaatccactgcttccggaagatatcgtggttgtggcatcagatgaggtggaagcagactggcatccaagacattgtgatacggagaaaacgtatgaatacaagatcttaaatagcaagttcccggatccgatgagaagaagagacacgtatcatgtttcttttgacctggattttgagaagatgagagaagcagcaggatatctgaaaggggaacatgattttaagagcttctgtaatgttcatactcaggtggaagatacggttcgcacgatttatgatctggaagtagagaaagaggaagagcttattacaattcgtgtccgtggaaatggattcctctacaatatggtcaggattcttgcaggtacgttgatcggagtcggaagaggagtaattgccccggaacagattccggccattcttgaggcaaaggatcgccaggcagcaggaatgacagttccaccacagggactaacacttgttaaaattgactaccttgatgaaaaaagcaaataattttttgtaaaggttgacaatgaaccgtttcgctgttagactagacagtgtggtgattgtcagtagatagaaccaaatttcaggcagagacgaattttaagcgtatgcctggaatttgtttttgtaaagaataacgaaaaaaatcgcgtattatgtaaaagtataaaaaaaatataaatattattaacaaattataaaatatttgattgacttttatgtgcaggtttgttatactgaatcacgtagaaaagagataacattgacgaattgttatcattaaagaaggattgttactgttaggcaggcaaaaccagattttatgagcgtcaccgaaggaatcaagggggatgccttaaagtttggcttttttattatgagggagtttttcccaaagttagagaaaggccaatcggatggttatagacaaaataattaataacaatattgtatctgcatttgacgaaaaaggcttagaagttgttatcatgggccgcggaatcggattccagatgaagcggggacaggaagttcctgcggagaagatagagaagattttccgtattaagagtcaaagcatagcagaacagctcaaggaattgctggcgaagatgccgcttgagcaggttcagatctcgaacgagatcatttcctatgcaaagaagacaatgaagctgaagttaaatcagagcatctatgttacattgacagatcatatcagttttgcaatcagccgctgtaaaaaggggattcatcttgagaatgcgttgctgtgggagattaaaagattttatccacaggaatttgaactcggaagatatgcggtagaacttgtgaaaaagagactgaatgtagagatgcctgaggacgaagcaggatttattgcattacattttgtcaacgcagagtatgggactgatattcgggatgcagtacggtttccgaatcaggtgaaagagattcttggaatcgtagcagatgaacttgggattgagatggatgaaggctcattgcattatgaaagatttctgacacatgtgaagttccttcttcagaggatttaccgcaaggagttacttgaagaggaagagaacgagattacagagatgatgcagagaaagtatccgagagagtattcttgcagcagaaaagttgcagattacatagaacagacggcagactgcaagctgtcaggagaggaagttttgtatctgacactccatattcgccgtgttgcgatggcggattcggaggacgaataaggttgctttgaacggtaacaaaagtgaaaggctgcattgagaaatgaacagccgcagatgaacttggactttagcgcattgcgcttttgtcatagatggttctctggtttgtggaagacccggaggatcagaggtgattttgaccggaggactcatttgccggttaaaataaaaagggattaaaaatgagagattattaaggagggaattctatgaaattcgtacagaaattaggaaaagctcttatgcttcctgttgcttgtcttccgatttgtggtatcctgatgggattaggatacgcaatgtgtccatctactatgcagggtggagatgtaactggtgttgttgagcagatcggatttttccttgtaaaagctggtggtgccttgatcgatcatatggcactcctctttgcaatcggtgttggtgttggtatgtctgatgaccatgatggtacagcaggtcttgctgcacttgcatcctggctgatgatcacaaaccttctttctactggagcagtatctgttcttagaacactggaagaaggatcaacagcatttatcgcattcagcaaaatcgaaaacccatttatcggtatcatcgccggtatcatcggtgcactttgctacaacagattcaaatcaactaagcttcctgactggctgtcattcttcagtggtaagcgttgtgtagcaatcgttgcaggtgttgtttctattattgtatctgcagttctgctctttgtatggccggtactctttgcaggactggttgcacttggaaaaggaatcgaaggaatgggagctcttggagctggtatctatgcattctttaacagattacttatcccgttcggtctgcaccacgcactgaacaatgtattctggtttgatacaatcggacttggagacctgtcacacttctggaatggagaaacatctgcagacgtttcctggagtcttggaatgtacatgtcaggattcttcccatgtatgatgtttggtatccctggagcagctcttgctatgattcagtctgcaaagagcaataagaagaaagttgcaatcggacttatcgcatctgcagcaatttccgcattcgtttgtggtgttacagagccattcgagttcgcattcatgttcctcgctccggcactttacgttgtatacgcattactgtatggtatctttacagtaatcacagtagctcttggattccgtgcaggattcagcttctcagcaggacttacagaccttatcttctctgctccccttccggcagcagctaagacatggcttatcattcctcttggaatcgcagctttcatcgtattctacgctgtattccgtttcgcaatcgttaaattcgatctgaagacaccaggtcgtgaagatgacgatgatgatgaaacaaaagttgttcttgcaaacgatgacttcacaacagtagctaagatcgttcttgatggtgttggtggaaaagataacgtagagtctgtcgacaactgtatcacaagacttcgtcttgtaatcaaagattacacaaaggttgatgagaagaagatcaaatctgcaggtgttgcaggcgttgttcgtccatctcagaaagacgttcaggtaatcattggaacaaaagttcagtttgtagctgacgagttcaagaaactttgcaaataagtttaaatgataattaggttatccgggataatgatgtgaaagaatacggataacacacacattaataatcccttttcaaaagcggaagtggaatcggcgaagagccggggacacttccgctttttatatatacaagactacttgacaaaatgtttacaatagtctatcatcaaggctacgggagttgctagaactcttatatatggaaggctgtgaagggaacaagtaacagacagaacagacacacagaaagttgccggttgatgagaggcgcgtagatgactgactgcgaatacatcctggagcttcacactgaaatctgaagatgggaattcatagatcgatatggggaacagatcagacagagagtaggctgtgacggagttgtgctcgttattgcacgaatgagactgacagacatatgttgtcggtgaattaaggtggtatcacggtgatagatcgtccttattgcatcatgcagtaaggtcttttttatacaaaaatccagcaagttacattgccatgatacttgtatacaaggccagaactgaatgatgcgttcgaaaaaatataacaaaaagaaaaggagaagaacaatgggaatttatgaagaacttcaggcaagaggcctgatcgcccaggtaacagatgaagagagaatcaaagaacttgtaaataatggaaaggctacattctatatcggattcgacccgacagcagacagtcttcatgtaggacattttatggcactgtgcctgatgaaacgtctgcaggaagcaggaaacaaaccaatcgcactgatcggtggaggtactggatatatcggagatccatccggaagaactgatatgagaagcatgatgacaccggagcagatccagcataactgcgactgcttcaaagagcagatgagtcgtttcatcgatttttcagagggcaaagctcttatggtaaacaatgcagattggctgcttgacttgaactacatcgatgtacttcgtgaggtaggacctcatttctcagtaaacagaatgctgacagctgagtgttacaagcagagaatggagaagggactcagcttccttgagttcaactacatgattatgcaggcatatgacttctacgagttgttccagaactatggatgtaaccttgagttcggtggagatgaccagtggagcaacatgctcgcaggtacagagctgatccgtcgtaaacttggtaaagatgcaagtgctatgacaatcacactgcttctgaactctgaaggaaagaagatgggtaagacacagtcaggtgctgtatggcttgatccaaataagacatccccatttgacttctaccagtactggagaaatgtcggagatgctgatgttctgaaatgtatccgtatgctgacattccttccgcttgaagagatcgacaagatggatgcctgggaaggcgcacagcttaacacagcgaaagaaatccttgcatatgagctgacaaagcttgttcacggtgaggaagaagcacagaaggcacaggagagtgcacgtgcactgttcagccagggaaatgctgacaatatgccgacaacagaactggaagaggcagatttccaggatggaaagattgatatccttgcagttcttgtaaagagtggacaggcatcttccagatctgacgcaagacgtgccgtaacacagggtggtgtttctgtagacggagagaaagtaacagacattacaacaacatatgctccggcagactttgacggagaaggtaagatcgtgaaaaaaggaaagaaaaacttccgtagagttgttgcaaaataatgaaatgaattaaaaatagtggctgttactgtagcatcagggtgaatacagtaacggccgcttcttataaggagaaaataaaaatggcatttaaagaagtaaagattgaggaactttcatttaacccttttacaaagatcagcaaggaatggatgctgatcacagcaggagatgaagagaagcataatacaatgacagccagctggggtggagttggaattatgtgggggatgaatgtggcaacagcatatattcgtccacagagatatacgaaggaattcgtagatgcagaagatatgtttacactttctttctttaaggaagattacagaaaagcattaaatctttgtggatccaagtcaggacgcgactgtgataaggataaagaggcaggactgacaccgtattacacagacggaacaacagcgtatgaagaagcagatctgatctttgtctgcagaaagctttatgcacaggagatgaaaccggagtgctttacagtagacggaccggatgagaaatggtatccgggcaaagattatcatacaatgtatatgggggagatcgtgaaggtgcttgtgagagaataagtaaaagatttcagctggtcagattatgaagtcgaagagccggaacaattaaaataaagagtagttacactgcttgcaaataataggagaactcctttcagttgtgataagatgcagtctgagaggagttttttgtagaatagagtaaataaaaatgctgcaaaacttgaaaatcttgataaaatatggtaaaaatagatatagaaaataccaggaaagcgggcggtagaatggaagaagtaaaaacaataatactgaaggatgtattgccttttgtggatccagtggcaagatcccatgcaagaagagttctgaaagatgcagaaggatacaaggagcttgtgattgattttcggggaattgaattcatggggcgcggttttgcggatgaagtgttccgtgtgtttcaggaagagcatccggagataaagattacaccgcttcatgcgagtacatctatgttagcgatgattcgccatctcggaggaaaacaacaataaatgatatttacagattccttgtaaaccgttacaataagaagtcggggcatttgtctctgatatcttattatatagaagaaaaggaacaaggaaaatggggatttatctgattgtatgcccgctggtgtttctggcgggctttgttgattcaattgcaggaggcggtggacttatctcgcttccggcatatatgtttgccgggattccggtgcataatgcaatcgcgacgaacaagctgtcatcttcaacaggaacggtagtatcgacagcgagactgattaagaataagaaagtagactggggatttgtaccaggaacagtgatcggagcgctgatcggttctgttgccggagcaaatctggcgctgatcatcagcgaccatattttgaaaatggtattggttgttatcctgccaattgtagctttctgtgtgttgaaagacaagaatatggatgtggaagttccggtcggaatgacaaagaacaagcagtatctgatcgcgattgtatgctctttggtgattggttgttatgacggattctacggtccgggaacaggaaccttcttgctgcttgtatttaccaagcttgcgaagataccattggagaaagcgacaggaaatgtgaagattgtgaatctttcttccaatatttcagcgctgatcacatttatcctggcagggaaaatcctgtggggactgggactggcagcatcctgttttagcattgccggacattatgttggtgccggaatggttgtgaataatggggtgaaagtgatcaagccgattattctgatcgtactggtgctattattggttaaggttgtgtctggaatataaaaagaataaggaaataaaagaagcagaatcatgagtggaaaatgattctgcttctgtgtttacattaccagtcgcagtattcttgtcttatccaaaataaaaatcgaacagaccataaacagatgcgccaggagtgtgctgacgatcacgccgttggaagtcagcaggaatccaatgtggaatccaaaccagcagataaatccggagtagcttgtcattaaaatcagaagtggaagttcttcccaaaatccatgaatcgtggaaagaaaatcatccatcgtaaagtcaaagtaaatgaagcgtccgactgcaagtgtgatgaaatacatcatcagtgaatcataattatcatcattataaatgaatttaatataaagcaaaatcaagataatataaaatgaagacacaagtctgatggaagccttttggttggaatctatttcttccaatggtacaaatacaatatcaagccatccatttaagataacggagaagcaaaggaagagtaaaaggataatatcctgatacttctgccaatagatggatacgccagggatcctctcgtcgataacatagtaaagagacagaaagatcagtacagaggtgctggcgaagaccatctcaaagaaactttcaataatgcttctttttcgctcctgatggtggcggttgatacgacggattgctttgtgagacagggagtcatcctggagtcgctggcgtgttttcaatttggctacgccaagaacaataccgatcacaacggccagcccgatcagcgagacgagcaggtagattccgatgtattcaaagttaaaatagtgtgtaacataagttttcattaaaatgccttctttcaaaatccttagcagatggtaaatgtttctaaccaccttaattttaattatagcacggtgatgcaagggataatcaggtttatggttagcgtatacttataagatttataaaatagtggacaaaattgaacctagtcaaacaaaataaactatgttagactatcaatagattgataaaaagataacaagcatggtatctgtcagaatggattgccagtcgtatgtagtgcgagtagtaaccaaaacagtttaccaggaagtggaaaaaggacaggatgagaataatgaaagcaattgtattcgacgtagacgacacattatatgatttatcaactccatttaaggaaacatgcagggaggtttttccggaagataaagatctggatctggaaggcgcatttttggcaagcagaagatacagcgattccgtgtatgcacgctgcttaagtggtgagatgtcaatggaagagatgtatatctatcgattcaaaaatgcatttcttgattatgggaagaagatcgatgcactcaaggcattggaattccaagcaatttatgaagaaaaacagcatgaaatcaagatgacagatgcaatgagacagttgatgcagaacttgaaagagaaggtgactctgggaatcattacaaatgggccggcgcagcatcagtgggataaagtgaatgcgcttggcgtaacggaatggatcccggtaggtcatgtatttatatcaggagcacttggtgtagcaaagccggataagaggattttcagtcgtgcggcggaaagaatggggattttgcaggaagagatctgctatgtaggagattcttttgaaaatgatatcgcaggggcgaaagctgcgggatggaacgcagtctggtataatcatcgtgaccatcaggcagcaggtgatgtaaagccggatgcagtagtaagaagtgaggaagaattgattgcatgcctgaagaagatcagcacgaaggagtgagcagaacaattagatacaaaaaagaaaaataacagctgtaagagaaatatgtttcaataacagctgttatttttctttttattcgttattcttttacttttttacttttatctttcggcaggatcagactgagcagcagtgatactacgaacacacctgcaacagcatttccgttgaagatatctcccacagcctgtgggaaagcgctgaagaagttcgcatctgtttgtgtaagaccaacgccgacgcagaaagcgagagatacaatgatcattgtgcggtcattgaactcacagtctttgagcatcttgattccttcgtacaggattgaaccaaacatcataacagtacatccaccaagtactgactgcggcagggagttaaagaaagctccaagcggcgggaacagagatgccaggatcaggatcaaagctcccataaggatcgtgaatcgattgattacgccagtcatagttacaagcccgatattctggctgaaggaagtcagtggcagacatccgaaacatccggaaattgtactggagaatccgtcaactgcaagagatccctgcagctcttcaatcttaatgtcacggtctaaagatcctttacatactgcagttgtagctccggttgtctcagcagcagaaaccaggaagacaatcgcaattgtaaagaatgctccaaggtcaaataccggtgtatgaccggtgaagaagacaagtcttggaaggctgaaaaatccgatttcactgattgttttgctgattccggagaaatcgatcattggagcaataccggcaacagtaaagattgcggaaaggatataaccgaagatcaatccaacaaggatgttcaggtttttgtatacaccatgcagtaaatatcttgaaaccagacagacaatcagtgtcacaagacctacaagaaggtgataccaggatccaaatgattcggaaccgcttccaccgccccaggaattcattccaaccgggagaagagaaagtccgatcgcgataacaacacagctggatacaaccggtgttaaatatttcttccaatactgggcacttaaaccaacaactccctcgaagataccaccaaggataacggcaccgaccatgccttcatatccgagatccggatttgtacagatcatcagaagacttccaaggaaagtgaagctgacacccataacgatcggcagtttcgaaccaatcttccatatagggtagagctgtaaacaagtaccgattccggctacgaacatggcgcactgaagaagtcgagtgatttcaacagcggtcagatgatcaccggtgcctctgacaagagcggcactgcagacgattaatacaggagcaaggttggctacgaacatggccagtacatgctgtaagccgaaaggaatcgcttttccgagtggtacgcggccgttcaggagatagatattttcttcgctgacggttgtgatatttcgttctttatctttcatatttacatacccgttctttctagatatttcatataatggttctgtatctgttatatagatccccaaacagaaaccactatatactggttcgcagattgttgtaaatgaaaatctgcgaaccttttatgtgattgtagttacaacgttacaattgagtgctgcttctgttactgggcacaaaagctgtgcccagtcatgctgtccccaggcagtgtagaacagcaacccaattcacttttagacagcgtctgcttcttcattttttccgagtctgcgaagcattgtcttcttgactgcacggaaaatgttttcataacctgtgcagcggcacagatggccggacatcattttacggatctcatcatctgagaattctttgccggcatttaaaagttcagttgcactcatgatgaatccaggtgtacagaagccacactgaacagctgcttcgtcaataaatgcctgctgaatatcggataactcaccatttggtccggcgagaccttcaagagtaaggatttcttttccctcagcccatacaccgagatagatacaggagttgaagcattccccatcaatgattacattgcatgctccacattctccgacttcacagcctttctttacgctggtcagacggaagtcatctcttaaaacatctgtaagtgatgcacggacatcgatcattttctcgactttcttaccgttgatcgtgcaggtaagtaatttgtactgtttattcatcgatcacacctcctgccaatctgatagattctgtcagtgcacgctctgcaagaacagtagcgatgtgctgacggaatgccttggatgctctccagctgtcacgtggattgatatcttccagaacagcctgaccaaattcatgaacaacagcttttgtaagcggtttgccctttgcttttgcctcagcagaaggtgcacgcatcggaacaggtcctgcaactccgtaagcaattctgacatccttgatcgtcttcttatcttcagagagttttacattgacagaacatcctgttgttgcgatatccattgcattacgcattgcgtatttaatgtaatgtccgtggtagccttcgtatgcttccttcggaatgatgattgctgtctgaatctctgccggtttcagatcaacgactcctgctttaatatagaagtcatggatcgggattctgcgaactccgtccggtcctgtgatctcaacaattgcatcccatgcatgaagtgttgaagcggaatcagcggatgtaacaccattacatgtgtttccaccgatcgttccgatgttacggatctgtggtccaccaaccatatcaacagcttccccaagtacgttgatatgcttctggatgatcggatcctttgtaatatgagagaagctggtcagagagccaatgcggatcgcaccgtcttcttcataagatatgcttctcatttcatcaattttataaatgcttacaagttcttttcctgcgcggcgtccttcacgcatctgtacaagaacgtcacttccgccggcaatgatctgtgcttccggatgttcctgtaaaagctgtatagcatgagctacgctttcagcttcataaagtgctttaagatcatacatttgcttctcctccttcctcaaacatatgttgttccttcatactgcggaacagatggtgtggattcaccggtgcatcatttacatagacacctgttgcctgataaactgcgttacggattgcaggtgcaatggaacatgtcggtggctcaccaagagattttgttccgaatgcacttgtaggctccgcattttctacgaaataagcacgtagtctcgggtgatccataaatgtggataacttgtaatcgagcaagttattatttaatgctcttccggtcttcggatcaaagagcaggttttcagaaagtccgaatccgattcccatactcataccaccgtgtacctgagcttcagcaagtgccgggttgataagagttccggcgtcatgtacattgacgatatcaagcagtttcaccttacacatcgggatgtcaacttcaacttctgcaaatgtacatccgaaggagtaagcattggacttaatttgtgctgtactttcagctgacagatgctcactgtgtgaaaggctgtaaagtgcttctgttgaaagatctccaagagacatcagaacacggttatctgtgatacgaacaatctgtccgtcaatgatatccaggttatattcaggcattcttgtcagttcatgcgcatatttcaaaatgcgttctttcagaagcagtgctgtctggcgaattgagaatccggctgtataagtctgacgggatgcataagcacctgttccgaatggtgtgacgtctgtatcctgacaggaaacaatgtgtacagcttcaagtggaacgccaagaatatctgcagtcatctgtgaatatgcagtatcagcaccctgtccgatctctgtctcaccgagctgaacctgaagagaaccatcctgattcaataccatacggcaggaagatgtctcaagtgagattggccatacagctgtgttgtaccagaagactgccataccgatacctctgcggatatctcctgtctggttctggtattctttgtatttacgaaggtaatcagtaacttcgattcctttgtcgaggcactggttgaatgtgtcgctgtataattcatttttagaaaatgcatccttatatccgactggcatcaggtttttgcggcggaattcaagcggatccatgttaagttttgcacaaatgtcttctgtatgacattctacagcccacattgcctgtggaattccgtaaccacgcatcgcaccggcaacggatttgtttgtgaatattgtataagcatcagcctctacgttatcacaaggataaagctgcgggaatgcgccaactcctttggcacagatactgtgaccgtgagatgcgtaagcaccctgatcggaaaatgcttccagttttcttgcagcaaatgttccatccgggcgaacccatgaaatgatgtggctcttgatcgcatgacgtacacgggtagaaacaaaggtctcctctcttggtacatcaagtttaataagatgtccatgaagctgcatggaaagccatgcacaaagtggttcatacaaaacatcctgtttatttccgaaaccaccgccgatataaggcttaatgatacggatcttaccccattcaactccgagtgcctgaccaacaactcgacgtacgatatgaggaatctgagtagaacttacaaccttgatgcggtctccttccatctcagcatagcagataaagttttcaatatgacagtgctgaacagttggtgtgctgtaccagccttctactttgattagtccaggttctttgatagcttcttcataatttcctttactgattgttgtatgcttgagaatattgtttggatatttatcatgaagctgaggagcatcctctttcatagcatccagaacatccagaacaaatggatattcttcatattctactttgatcgcacgaagtgcctgtgcagcggaaacctcatcctctgctacaaccgcagcgatatcatccccataaaatctgacgcggtctgtaagtacaagacgatcggcaacatcctgatgtgattcatctgtggaccatggatgtccggcagttggaaaataatgcttctcctttaaatcaaaacaggtaaatacttttacaactccaggtatcttctcagcttcagatgtgtcaatagaaagaacatgtccgttggcaattgtagagtgtaaaatacgtgcaatataggcactcttatcacagagatcatctgtatattttgtacgtccaattactttatcgtaggcatctacacgagtaaccttttttcctacatacatgttatcccctccttaaacataagtttggatcaaccgtttacgtaaaaatcaatatcctgtttcatctgaagatattgggccttggtaatcacgatctttcctttattcagcgtcagaagattcatctcttccagctttctgatgtttctgtccagagttttaatagaaatccccacttcttcggaaatgcgcgctcgtgtctggttaagtaccagaatctccggtatcttgtaagtccggcaaaacattcaatctcaccaaagaagtcacctggtccaaagtccttaaagaaataagatttctcatgcatcggccattcgactccggttactttccctgataaaatgatgtatatgtacttgcattcttctccggctttgataaaagtctggtcagcttccacatcaatcacggacatgtaatacttgacttcctccgtacagtttctgaaaagccggttcatatattcctgctttttaagtggtaagctattaaataaatccacgaatcttcctcctcctttttattcattatagagagaaaaggtgatacattaaaaggccatgtgacattttttctccgcttttttgaattatggcgttttggacaaaaaatgactataaattaacaatattataacgtttatttggtgaaaatgacagttggaattgaaaaaatattgatttttgaagttatctacagattatcaacaaaaaagatgagttataaacaagaaacacattgcaattaaaagtgaactgggatattctgagaacataccaattcatgaagttggtgttggacattctttattttaaacatcgcatcaaaataaaagatgaaaaacaaattacaaaactattttccaatgatcagaaccaaaggacaagtgcttgaagaaattcgcaatagcccggaaatgtggaagacattttgtggatgggaagaaaaataccaacaggaatatcttgacatttgcactggggtgaaaggtgtaaaacttctctatgatacctattttaaagttattatgaatccggacaccagacctgaaaggttaaatgattttctatcagaaatattaggaagaaaaattagaatcttaaaagtacttccgaatgaatcggcgcgtattgcagcggagagttccttattgattatggacattgttgttcagtttgaagatggtagtatagcaaatgttgaagtacaaaaaatgggatatttatttcccggacagagaagtgcctgttattcttccgatttattgttacgacagtataaacgagtgcgcgcagaattaggaaattcatttacttataagagaattcagaaagtctatacaattgtattatttgaaaagagcagtgctgatttccgcaggttttcgaaagaaatatatattcatcattgcgaacaaaaaagtgatacaggagtagaagtgaatttactgcaagaatatacttttatatgtcttgacatttttggtgacatcattcaaaatgaaaacagaaagataaaaaatagattggaagagtggctcgtatttcttagtcaggatgatccggagatgattattaaacttttgaatcagaattcggattttcagaagatttatgaagaaatctatacactctgtcttaatatggaaggaatgatggagatgttttcgaaagaacttgagattttggatcgcaatacagtgaagttgatgattgacgagatggaagaagaattggcacaagtaaaggcaagtgttgcaaaacaggtcgaagaacaagtggcagagaaagtagccgaacaggtggcagagaaagtagccgaacaggtggctcaagcgaaggagaacattgcaagagaattagaagaagagaagcagaagatagaagaagaaaagcaaagaacggaagaagaaaaacaaagagctgataaagcagaagaggaaaatatgagattaagaaagaaattgatggaattgcaaaaattgtaataaggtagatacgaaaaatctaaagtatttagaaaaatttaaatttgtgcttgcatatctctggcatgtatgataagatataactcgtgtcagagataacacaagacacgcgggtgtagttcaatggtagaacaccagccttccaagctggatacgtgggttcgattcccatcacccgctttttttgtacccattttgaactgttcagagccaagcggatgtttagatgaaatgtgcagcatttcggaaagtggatctggatggtttattttatttataatagaaggaggacgagaacatgaaaacagcaattacaatcgccggaagtgactctagcggaggcgcaggaatccaggctgatatcaagacaatgatcaccaatggagtatatgcaatgagtgcgattactgcattgacagcgcagaatacaacaggtgttacttctatattaaatgcaacaccggaatttttaggacaggagcttgacagtatctttacagatatctatccggatgccgtaaagatcgggatggtttcagataaagaactgatcaaagttattgcagcgaagctgcgtcagtatgaagcaaagaatattgtagtagatcctgttatggtagcaacaagcggagcgaagctgatcagtgatgatgcggcggatacattgaaggaagaattattcccgcttgcaagtgtactgactccgaatattccggaggcagaggagttgatcggaagaaagatcacaagtgcagaagagatgatcgatgcggcgaaagaaatttcagaaaaatatcactgtgcagtactttgcaagggtggacataacttaaatgatgcgaatgatctgctgtatgcagatggagtgtatcgctggtttaacggaaaaagaattgataatccgaatactcatggtacaggttgtacattgtcttctgcgattgcttctaatcttgcaaaaggattctcattggaggaatctgtagagcgtgcgaaagagtatatctcaggggcacttgcagcaatgcttaatcttggaaaaggaagcggtccgatggatcacggatttgcaattaaaaacgaatatataaaagaagcgaaagactgatcaaaagcccttcgctttacatattaaagaggagaaacctaaggagtagcacgaagcatgatctttgcggtaaagactccattttcataagtgaaatcacaagaaccatcgttcttttctgctgttctgcggacggattgggtaccaaccccaagtcccgttcgcttggtggaatggaatagatggtctttttctttgatatttccatcaaaattattctcaacccgaattaaaagaatagaagcagaatgttgatagatttccaacgatatccgctgctgcgcagcggcagttttgcgactggcttccaatgcattttctaatagattggaaagaataagacagagatccatttcatctacggaaagttcttttggaagatcaacacgggcatcaaatggaatttcttctttttgggcaagtgcataataatatccgattacgttatcaacagactgattttcacagaagtgataatcaagggtgggaattttatccaatgcattttgcaggtattttttgatcttttctaaatcaccgtctttggccatagcagatagttgtataaaatgatgacgaatatcatgtcgagcctgtctggcttcttctatcgcacttcttaaattctcatatcgttcctgttgtacagaaagaaaaagattttcctgctgaagttttttgtttttattcaggatattagccatcattaaaaacatcgagtaaaataatgcaaggatgagtagaagagcataaacaatcactatgtatccacgcagaaaacgctgtgtgtgcaggatggtgttatattttggaatcaaagcaaggttcaatccgatgaccagaaccgggagaatccagaaaacataccaggtctgagcaagattttcatcttctaccatttctttgacggaatgggaggctggataccatatgagaaggacgaaaagaatgcagaaaagattatacaggattccaaaagtagaaaaaccggaaaatgcaaggtgttcagaaccaaaattcaacattgcagaagcagctctggaaaggctgttaaagcaggaaaaaactgcacagacggcaagaaagatgctgacagatttccaaagtgaaattaataaagtgttatgatatagaacaaatagaacaaataaaagaggaagaagaacagatcttgttgacaaatggaatctatagcatgcaaaaccacaaaaacaagagcatataataagaagcggaagcatccagacagccagcttcttaggtgtttgcttcagagatgatcttaccggcagataggcaagcagcacaccaggaatcaaaactgtaaattccaaagtctggaaaattaaagtccgcatcaaaatccctccttttgaaatagataattcataaagtgttgtcgtgcaggtttgcacagttctctactgacaacgatcttgcttccatcatctaaaagaaacattgttccgtcaaaatcaacagcatgttccatgttgatgatcgtccctctgttgcagataaaaaagcgggaatcttcttttaatggagaagtaaaagtcccaaaagactgtcggatgacaagttctttttcttttgttgtatgaatatggatcatatgagaaaaatgatctgcgtgaatgatcgttttaaatggtatctgaagatcacttccatttacttttactgtcagttttttctccgaagccggaatccggggcaggatttcatcaattaaagaagacagttcttcttccgtataaggttttaccagataatgcatggcacgtactttaaaaccttccagtgcatgatccagggatgttgtagtaaaaatcaacagacagtctttgttggtatttctaaattcacgggcgatttcaattccatttgccccgttcatataaatgtccaaaaataaaactgtgaagtcatgttcttttgaagccttgagaaatgcttctccattctcatattcatagcaatgaaactctacatttttctgatctaatatattttctaatcgtgttcgaagcagaatacgctcttctgcaatatcatcaacaatagcgattaacatacgaatatcctccctgatttgtatttattcaaaataaatacaaacgttttgacataggattagtataccacagaataccgattcgtgccattttcagacagttcatgccaaaaatattgaaaaatctggtatcaaaaatataatgataagaaatatgattgccgataatatagcaaaatacaaatgaggaggaaaaaacggatatgaaaacaataaaaaggataatggcagcgctcatatgtatgacgatagcacttacggggattccaatcagtgtaaaagcggcagattccagtggaagtatgtcaacagagatggagacaaatagtgaattatttattacattggaagaaaacaaagactaccgttggaatgtaaatgataatgcagaaaaaaacagtgttgttcatttggatagttcggaaggaaataattgtcgtttccgtttagatcatatagaaaatgaatggtatgggattaaacatattaaagtagatggaacggatcgttttgcagacgtggatggtaaaagtaaagacagcggtgcagtacttcatttatgggagtcttcagacagtgaagtaaagggaaataatcaccgccagtttgccttttattatatcggtaatgatgcaaatggaaatgcgagatactatattaagaatagaaacagtggaaaatggatcggatatgaaggaaaactgaataataacaatccgaaaatcatccagacagatgagagcaacagaaaagtctggctgatcacaaaatccgtagttccactcacaggaaaagaaagtcaggttttaaaagaagaagatacaagtgctatttgtgaaattcatgaagcaggaaaacttgatgctttaaatagagcaagtaatatagcggttccaggatcttgtccaacgtttcaggtaatgggaataaccagtaaatggaaattgaaatggataccagagtatcatgcttatcaaatagatgcagtctctgatggtgaaagcaaaacaaatttatctttagatgtagaaggagaatcaggaaaactttgggcaagcgtgaatatctggacgactgaaaaatttgacaggaatcagaatacaagtcaattgtggcgattttttaagcagaaagatggtacatataaaattcagaatgccagaactggatggtatatcgaaaatagagtcccaagtttagtgtttgggaaagagggaatgaatgtagagttatctattttagcaggtaatacagatgaaacagcttacagttatgcgaatgaatggatggcaggcatcccagatgaggcactactgtcttcaattaatattccggcaacacacgataccgggacagcaggggttgtggaagatttggttccaagtgtatctattacatcatgtcagaatctttattatgatgagcagttgaatatgggggctcgcagttttgatatccgtgcaaatgcgacaaaagatgatgcttctgcggcagacgtaaagattgtacatggaggcgaattatggcagtgtcaggaaaaaaacggaaacgatcttacattacagtcaatcctcaatacttctctcggtttcttagagaagcataagtcagaaacagtcattcttacagtaaaaccagatgccggttctacaattggattagagcatgcggtcgctgaatttattgaaaaaaataaggacaaggtctacagtggaggggatatcccatcaatgaaggaagcaaggggaaaaatcatatttcttcgaagatttaatctgaccaagaactacgacagttcggttgaacgtgcgatgggatttaaccttacgaattgggatgacataaaatataaagattataaatatgcgtacaagttatatgatgatggaaaaaatcatgtgtatattcaggatgcatataatacatatggaagtgagaagtggccgtatatattagaaacgatgaagcagacaacaggacaggatacaagccatccgatcgagtacaattcttgggtatttaattatacctcttgctcacgaggagcaccgttaggattgacacaggaaattaatccgagattatttaaagacgaagacaattgtattgacaaccgattcctcggaacagtaatgcttaactttattgatgaaccaatgtcacggttgatctatgagacaaacagcaacatgatatttgaaccaaagcttcctacaccggaagtagaagttgaatatggtcagacattggcagaagctacattgaaagggattgaaaatgcaccggcaggaacatggaagtttgaagatgcagctcatgttgtgacagatcaggaagtagcagatcagacaaaatttgaactgaccttcctgccggcagataataaaaaatacaaaactgttactatgtgggttccggtaaaaacagtgaataagtcagaagtgatcacagcgtatctcggatatgaagaaatttcctatggtgaaactccgaagatgtcatacgttgttgcaccaacggaaacactgagcgcagatgaagtggaagaactttttgcaaatgttacggatgaaatgagaatccaggagacaggacagtcattaaatgagacaatcgatgcaggaagctataagattgattgtccggaaacagtaggcggattcaaggtaaactggattcatttgaaagaatacgatcttgatatcaatccagtgaacacaatggaaacaacaggttccaaaagcagcacagcagaaaatactacattcgaaaatggcgcagttagtagtgcacagagaatcgttgtccgtgcagaaaagaaaacaaagacatatggagatgcgttgaccagtgcagatcttacatttacgatcagtgattcagaaagggcgaaacttcttccgggagatactgttgaaagtctcggactgacattgaaagcaacaaccatcgaaccggaagatattctgagaggaagcacaacagatgcagatggagatgacattcttggcgcatatggcaatgaaggaagatatgtcatcctgaaagataatgtgacaaatacaaattatgatgttgtagttcttccggcattccttaacgtatcaccaaaggaagcagagatagaatggaatgcggcagcacagtatacatatacaggaaatgcatgtggaatagaggcaaacgtgaaagcagacagccttttagaaaaggatagttgtgcgattaaaaaactgctcaatgcagatcatacagaagttggaaattataaggcgcttgcaataggtctgacaaatgaaaactatatcttttccggcacaaaccgcgtgcatgtatgggaatatgagattttgcaggcagatccagaagtgactttcccggcagcagaagtgatttatggagacagcttaaagaaagcaacactttccggtcagtcgggagaaggtgtattccgttttgcagacgatacgacaatgcttacagtagcagaggatcaaagtgaacaggagatgatcttcacaccggctaatccgaactacaagacagttacgtcaaatatttctgtaacagtaaaaccgagaagcattacgatcagaccggaccgtacggagaaagaatatggacagacgatcacagagtatacctggtcaatcagtgatggaagtctggcaggggatgatcagatagaggatctgaaaataaatgtcacattgaccgcaggagatgcagagaaagagacctgtgaagttggtacttatgaaataacagaaaaggctccaacaacagtagaaaatcaaaactatgcggttacatttgaacctggaatattgatcgtacagccaaaaccggtagatgttgtatggaatacagacggaactatcatctatacaggaaaagaagtgaatgttacagcagaattatcaggagtactgtttaaagatgaatgtaaggcagtagtagaagatggaaacgctgtggaacctggaaaatatacagcaagtattgtcggattgacaggcgagcaatgttataattatgtgcttcacggagaggatacagactatcagatagattaccagattgtgaagaaagaagaaacaaagaatccaaccgattcaaaggaaacatcgacaggtactgcaggaaagaaaccaacaggaacttcagtgtcaggaaaacaggtgaaaacagcaaagacaggggacagcatcagttacatctggattctgatgattgcaggatcaattgcagtgatcggtggaatgatttatgttattagaagaagaaaacagaagtaaaattaaagtgaatctataaacgatagatagaaaggtgtcaggcatatgtggaagctgttattttaaacttcggcctgacaccttttgttgaaaaaaagataaaattagtatattatgaaaacagatgcggtatatcttaaacatgtaataaaaagtgtttctgatcgcaatgtgttgagagaaaaggagagtgagaaatgagtgaattaagtaaaaaagcaagaaatagaacaagggtccagatggtactgacaatgttggttattgtctccattatcagacaattctttttaggaaactatcacaatatgtttcttggaattctaacattgattttgtttatggtgccacagtttatcgacaagaaacttggagtgacaattccggttggtctggaaacggttattctgatttttatcttttcagcagagatacttggagagatcaatgcattttatgtaaagattccggtatgggataccattttgcatacaacgaatggattcctgatggcggcaatcgggtttgcgctgattgatttattcaacagaagtgatcgattttcaattaagatgtccccatactttgtggcattttttgcattttgtttttcaatgacagttggtgttttgtgggagttctttgaattcagtatggattggtttttcggattggatatgcagaaagactggatcgttccggcaatcaattcagtgaagctgaatccgacaggagcaaatatcccaatccatgtagatgttcagtctgttgtgatcaacggtgagacgtggaatctgggcggatatttagacattggaatcgtagatacaatgaaagatcttatggtgaattttgtcggagccgttgtattttctgccattggaattttatatttgaaacatcgtggaaaaggaaaactggcagcttcattaattccacaggtaagagatacggatgcagaaacatctgagaaatagaaaacgtaaaggacagatcgatgaacagtcaaaaagaaattagaaatataaagataaaaaaccagttagagctctggctgttctgtgcaattatcggtgcagttgccggtggattggtctgggcacttttaaagatcatgtcagtcgggatgaatcttatctgggaatggattccagaacattttttattaccatactatacgatagtggtctgtgtgatcggtgcatttcttatcggtatcttccggaaggtgtacggagattatccggaagaaatggaaactgttatggcaaaagtgaaaacggagaagcattatgattataaaaatatgcttgtcatgatgatcgcagcagtgctgccgcttttgatcggaagcagtgtaggtccggaagccgggcttaccggaattatcgtcggaatgtgttactgggcaggagataatctgaagtttgccagacagcatgcgaaggaatactcccagatcggggtagcagcatccttaagtgttttattccatgctccgctatttggattgtttgaagtggaagagaacactttagaagagaataattcagaacaaactgttgttccggcaggaatttcatcaaagatatttatttatggaatcgcaattgctgctgcaacaggtatttatgcaggactttccgcagtattcggttcaggactttccggttttccaagctttgaggcagttgagatcggaaagatggactatgcattaatacttctctatattattgcaggatgcgtgttagctgttttttatgaaaagacacatcagataacgaagaaaactgcgaaaaaggtaccggcagttcttcgagaagttctcgcaggaatttgtcttggaatctgtggaatgttaatcccggcagttatgttttcgggagaagaacagatgggagtgttgatgaaagagtatagtcaataccttccgttagcactgatcggagttgcatttttgaaagtgcttctcacaaatatttgtatacagttcggtttgaagggaggacatttcttcccggttatcttcgcaggtgtatgcatgggatatggcgtgggaatgctgatttgcggaaatgtagagagtcatctagttttcgcatctgcaattgttacagcggcgcttctaggtggaacgatgaaaaagccgttagccgttacaatgcttctgtttctatgctatccggtgaaattgttcgtatggatttttgtggctgcggcagcaggcagcaaatgcctatccttatttgataagagaaaagtggaaaacaaaaattccgttgagtgaaaactcagcggaatttttttaccctttttgagatgtcttccagttcttctttggaaagttccgggagacgttctaatttatccaggaacatcattgccgtttcacgacgctgcatctctacaatctgtccgtaataattgacaacaacaccggtaacgattgcaacaacgaagatcgtgtagattgtgacaagtacagaaaccagtttgccaatgaaagttatggcaacaatatcgccgaacccggcggtagaaagtaccgcatagcaataccagagggcatctccatagtggttgatgtcaggctctaccagttgaatgatggctgcggatacaaagagaaatacgatataaccggaaagaatctgggttgctttcgtgcgttttaggatcatccataaaagttttagctttttcatatattaacggctccgtttcataaatttcagataaattaattatatcatgaaatggagtcaaaagaatagttagataaaatttattctgcggttttcattttactgcctttattcagaattccattaaagcggctcatgaatgtgattgttgtaattgtggctgcaacaatatcactgatcggttctgcaagaaagactgcaaaaaccttatcctgaataaagagtggcaggataaagatcagcggaatcagcaagatcagttttcttaagcaggcgagcagcagactgacctttgcctgtcccaatgccatgaaactttgctgacatgaaacctggaatccgagggagaaaatacctgccatatagattctcagcgcccatgcggtataagtgatcagatccgtattgttggaaaagattcctgcaaacagcttaggaaacagcagcatgatcagccagaaacagctggtgaaaatcgtacaaaccttaaattgtgtaaagaaggctttttttactcgctctttattgccggcaccgaagttataactcatgatcggctgaccgccctggcagattccctgcagtggcagcgtggcaagctggctgacacttgtaatgatcgtcatggctccgacagcaaggtctccaccatatcttgacagactggaagtaaagctgatggagagaatactttctgtagaaagcatgacaaaagtggaaataccaagtgcaaggcatggtaagataacatccttttgtaatctgaaattttcttttctaagatgaaggatcgtcttctttccggataagaaacgaagaatccaaatcgcaccgacagcctgacttaaaacagtggcaagtgcggcacctcttacaccaagattgaatacgaagataaaaatcggatcaagaatgatattgatcacagctccgatcacagtagtcatcatactgatcttggcaaatccctgtgttgtaataaatggattcattcccatcacgattaagacaaagatacttccaaggatatagattcttgcgtatgctactccgtacggcagtgtcttctcgctggctccaaaaagtgtcaacagctgtggtgcaaatgtaaagaaaactacagtaagtatgacagccataaggatgagaagtgcaaaacagtttccaaggattttttcagctgttttattatctttctttcccatagatatcgcagcacgcggagcaccaccggaacctgcaagcatagcaaaagcgttgatcagcataaggatcggtgtaaataatccaacgccggttaatgctgcggctccaacaccggaaatgtgtccgatatagattcgatctacaatgttatatagaagattgatgatctgggcgacaaccgcaggaattgcaagctgtgccagaaggcgcggaatcttttcagtctccatcgcctgagaatttgatttgctattcatatctgttttctcctaaatagatttaaagtcaaagaagattatacatctcatgtaatggaaaaatcaatattttaccatatatgcattacatgctgcattgcaaggctgactactgtaattccaacccagcaggaagcaccgagaaggattggctttccaccagatttgacaagcttcacaacattgctgttcagaccgatcgcagccatagccatgataatgaagaacttagacagttctttcagcggagcaaatacatccgcacttaccccaaggctcatgcatacagttgtaatgacggccgcaatgataaagtacaggatgaacattggaaaagctctttttaagctgaacttaccggatgattttccgtcttttgcggctgatttcgcacgaattagtgagagcacaagtgtgatcggaatgattgcaagcgtacgtgtcagtttaactgtgacagcagtattaagtgtctcacttccaagattccacatgctgtcccaggtagaggcggcagcagttacggatgaagtatcattgatcgcagttccggcaaagacaccgaaagcatttccgcttgttgtgtcgaagccgagtgcatttccaagcaccgggaaaagtacagcagcgataatattgaagaaaaagataacagaaatcgcctgtgcgacttctgtgtcatcggcgtcaatgacaggcgctgtagcagcaatcgcagaaccaccgcagatggaagaaccgacaccaacaaggatagatgtgttggaaggaacattcagcaccttgcggagcagccatgcaatgatcaaagaggtagaaattgtactgacgataataggaagagactgctttcctgtctgtaagataactccgagattcataccgaatccaagcagaacaacagcagtctgtaaaataattttagatgtccatttaattcctgattcggctgttcctttttcagtccaaaagcaggtgatcatcattccggcgagaatcgcaatgacaggtccgccgattaccgggaatgattttccaatcagccaggatggaatcgcaatcagaaagcagaccagaattcctttgaaatttttttgaataaaattcatgatagtttcctctcttaagtcttttgttactgtcgcactatgggcgtcagcaaccgtatttttatgaaacaattatagattataacactggcaaacagaaaaaataaagactttacaaaatttttagaaaagaattagcactcaactatttacagtgctaacaatccgtgctatattcctaatagaacacaggaaaagaaaatttgtggttcaaaggagggaaagaccatgaatatcaataaatttacacagaattcattacaggcagttcagaactgtgagaagattgctgcggataacgggaatcaggaactggcgcaggagcatttgctgtatgcgctgctgacacaggatgacagtctgattttaaaattatttgagaagatgaacattcagggccagctctttattaacagtatcgagcaggcaatcggcaagagaccgaaggtacagggaggtcaggcttatgtcggtcaggacttgaataatgtgctgatccatgcagaagatgaagcaaagcagatgggagatgagtatgtctctgttgagcatctgtttcttgcaatgctgaagtatgcaagccgtgagttgaagcagattttccgtgaatatggcattagcagagaggggttcctccatgcgctgtcaacagtaagaggaaatcagagagttacttctgacaatccggaagcaacttatgatacattgaataaatacggtcaggatcttgttgagaaagcaagagatcagaaactggatccggtcatcggacgtgatgaagagattcgtaatgtgattcgtatcctgtcccgtaagacaaagaataacccggtgctgatcggtgaacctggtgtaggtaaaactgcggttgtagaaggacttgcacagcgaatcgtcagcggagatgtaccggaaggactgaaagataagacaatcttttcgctggatatgggagcactggtagcaggagcgaagtatcgtggtgaattcgaggaacgtctgaaagcagttcttgaagaagtgaaaaacagtgacggaaagatcattcttttcattgatgaacttcatacgattgtaggagcaggtaaaacagacggtgcgatggatgcaggaaatatgcttaagcctatgcttgccagaggtgaactgcactgtatcggtgcaacaacactggatgagtatcgtcagtatattgagaaggatgctgcattggagcgtcgtttccagccggtcttggtagatgagccaaccgttgaggatgcaatctctatccttagaggactgaaagagagatacgaagtcttccatggagttaagatcacagatagtgcgcttgttgcggcagttacactttcgaacagatatatttctgaccgtttcctgccggataaagcaatcgaccttgttgacgaggcgtgtgcattgatcaagacagaacttgattctatgccgacagagcttgatgagcttcgccgtcgtgtgatgcagatggagattgaagagtctgcacttaagaaagaggaagatcgcttaagtaaagagcgtctggaacatttgcaggaagaactggcagaactgaaagcgcagtatgcaagtaagaaagtacagtgggagaatgagaagaattccgtagagcatgtgcagaagatccgtgagcagatcgagcaggtgaacaaggagattcagaaagctcagagagagtacgatctgaataaggcagcagagcttcagtatggtcgccttccacagctgcagaaacagctggaagaggaagaggcaaaggtaaaggcaaaagatctttctcttgtgcatgaatccgttacagatgatgagattgcaaaaatcgtttccagatggacaggtatcccggttgcaaaactgaacgagagcgagagaaacaaaactcttcaccttgcagatgaactgcataagcgtgtcatcggtcaggatgaaggtgtagagcttgtaactgaagcaatcatccgttccaaagcaggtatcaaagatccgacaaaaccgatcggttccttcctgttccttggacctacaggtgtaggtaagacagagcttgcaaaggcacttgcccagagcctgtttgatgatgagaacaacatggttcgtatcgatatgagtgagtacatggagaaatattccgtgtccagactgatcggagctcctccgggatatgtcggatacgatgaaggcggacagctgacagaagcagtcagaagaaaaccatattctgttgtgcttttcgatgagatcgagaaagcacatccggatgtcttcaacgtattgctgcaggtactggatgatggacgaatcacagattcccaaggacgtacagttgacttcaagaatacaatcttgatcatgacttccaacattggtgcaaattatctgctggaaggcattaaagaagatggttcgatcgatgaacagagtcaggagatggtaatggatgatctgaaagcacatttcagaccggaatttctgaaccgtctggatgagattatcatgttcaaaccattgacaaagacaaatgtacgttccatcattgaccttctggttgctgatgtgaaccgccgtctggaagaacgtgaactgagtgtcgagctgacagatgcagcgaaagactttgttgtggaaggtggatatgagccgatgtacggtgcaagaccactgaaacgttacttgcagaagaatgtagagacattagctgcaaaactgatccttgcaggagatgtgggacgtggagacacgatcttgatcgatgtgaaggacggtaaactgacagcaggtgtgaagaaataaaatatgataccagggtcaaaaggtctgaaaccaccggtgcttgcacaaaggtggtgtaatggccttgggacccgccccaatatgagcataaaagtggagcgtaagcttcacgatatgcgaatagtgggtaggattgtgggagtgcattgcacgaaacaatccgtaggtatcctagttgggggcttttgcccccaacatcaaaatatcagtatagttacgatataatatacagggctgtgaaaaatgaaaattttctggagatttttagaaaattgagtttttcacagcctttttttcgttcaccgaagtaattgatacaagagcagactctatgttaaaataagaaactgacagaatgcatatgcatacaacaagaattaatactaagaaagaactcaggcagaatctagaaaggaggctaccatggcgcgcattattttccacatcgacgttaattcagcatttttaagctggacggcggttgaacaattgaaaaatggatcaaaagtggatctgcgggagattccggcgattattggcggagatcagagctcgcgtcatggaatcgtccttgcaaaatcatcacttgccaaatcctatgggattcagacgggtgaacctgtagtaaatgcatttcgaaaatgtccgaatcttgtgacagcaccgccaaatcataagatgtacagggaaaagagccggatgctgatggatttcctacgtacatatacgaagaagattgagcaggtcagcgtcgatgaatgttatatggatttcacagagcttgtcgggcgatatccaacaccggtggacggtgcaatggagatcaaagaagaagtgaagaagcgttttggattcacggtgaatattggaatctccagtaataagttactagcgaagatggcttcggattttcagaaaccggatcggatccatacattatttccggaagaggttccgcagaaaatgtggccgcttccgattggagaactttttatggcagggcgttcaagtgtggaggtcttcaagaaacttgaaatcaatacaattggagatcttgctcatgcggatgtaaatgtaattacgctgcatttaaaaagtcatggccggatgctctggaatttcgcaaatggaatcggggacgataaggtacagtatgaaccggaagaggcaaagggagtaggaaattcaacaactctgtcagaggatgcaacgacttatgaagaagcgagagatgtatttcgtgagcttgcacagagcgtgggaagcaggctgaagaaggcaggcaagaaagccgggatggtgagtatggaggtacgctactatgatttcagaaatatgtcgcatcaggtgcaacttcaaaagccgacgaatgattcggttatcttatgtgagacagcatgtaatttgttccgtgaaagctggagtggagaacctgtccgtctgcttggaatccgaacgtcaaagttagtagaagagaatgcaccggagcagctgacaatctttgatatagaacttccaaaagaaccggatgagaaacataagaaattaaatgctgcattggaacagctgaacaaccgttatggaaagggtgcggttgtgaaaggcacattttataaaccggacggaaacaagaaaaaagatgaaaatcagaagagatagaaagaggaacgtgcattgaaagagaaaaattataatctggaattgattcgaatgatttcttttatatttgttattgtgatccatgtatcaaactattactgcagagcctatggcgatattacgattggggagtacaatttttcactgctattaaatctactggcaaggataagtgtaccatgttttttcatgattacaggagcacttctgcttggaagacaggaatcacttcataaacatgcaaaaagaatctttcgttttctaattgttctgcttgtgtggagtgtaatatatatgatctggaatgcagtttatatgaaggatccttatcaaatcaaagatttattatataagccggtagaacagcatctgtggtatctgtatgcaatgattccgatctatctggtacttccttttttccaggttatgtgtaaagggatgaaccttcggatggaacgcgcatttcttgcggtgattacggcggctgttttgttcaattatatttccacattttttgatgaaaagatgtattattctgtcccaatggtgggagacagaatctattcttattatgtatttatcggatattatatatataaatatcgtaagcatgtgatgaaggggaaaatgattccggcaggtatttttgtagtatgcatggcattaaattatgggctgacttatgcggcaaccttgcaggatggagaacattatgaacgtctgctggaatatggtaatccactgcttgcactggcagcatcgatggcatttcttatgttagtacgattgaaaaagagcgaattcaatccgtccgaacaggcaaagaagtggattgacagattttgtggatgttcctttgggatttatttgatccatatcatgtttcttgatgtttataagagaaatattaagccagagacattttcagcctggatcatgattccggtagtgagtgtgggacttgtgttattgtcatttggatgtgtctggctgattcgaaagacgaaaacaggacgaaagattatgtaggtttttttgcatatgtgctgagattatgttattctataaaggttaagacaatcgttatttgcctgaaagtcaatgatgcaatacaccagttcagaacaggagggttagatcatgaaattagataaattattagaacgcctggattacacagtagtacagggaagtgattctacggaagtaacaacactgatcaatgattcaagaaaagtggaagaaggatctgttttcgtgtgtatcagcggagcagtatctgatggacataaatatgcagcggatgttgcggcgaaaggtgcggcagctgttgttgtagagaaagatgtcgaagtgccggaaaatgtgactgtaattaaggtagaggatactcgttatgcactggctctgatgtcagcggcttactttggatatccggcagataagatgaaagtcatcggtattacaggaacaaaaggaaagacaacaacaacttacatgatcaagtctattctcgaagagacaggacacaaggttggattgatcggtacaatcgaggcaattatcggagacaagaagatcccgtcatgtaatacaacaccggagtcttatacaatccataaatattttgcagagatggtagaagctggctgtgattgtgttgttatggaagtttcatcacagggactgatgcttcacagaacagcgggaattccatttgagatcggtattttcacaaatcttggaagagatcatatcggtccgaatgagcataaggattttgatgattacaagagatgcaaagggcttttgttcaaacagtgtaagctcggaatcgccaatgtggatgacaagtatttcaaagatgtatttaaagggtctacatgtaagattgagacatttggattttcaccggaggcagatcttcgcgcagagaatgtagaactggtatccagaccgggatatcttggtgttgcatatcatgttgcaggcgtgatggactttgatgtggaaatcgatgttccaggcaagttcagtgtttacaattcactgactgcaatctcagtctgccgccatttccaggtgccggttgagatgatcaaagatgcacttaagaaggcaaaggtaaaaggacgtatcgagatgatcaaggtgtctgatgattttacactgatgatcgattatgcgcacaatgcgatgagtcttgaaagtcttctgacaacattgaaggaatataatccgaagcgtcttgtatgtctgttcggatgcggcggaaaccgttctaaagacagaagattcgagatgggtgaggtatccggaagactggcagacctgacaatcattacatcagataatccgagatttgaagaaccacaggatattattaacgatatcaaaatcggaatcgcaaagacagatggaaaatatgtggaaatctgtgatcgtaaagaggcaatcaaatatgcaatcgaacacggcgaaccgggtgatgttattgtgctggcaggaaaaggacatgaggactatcaggagatctgcggcgtgaagcatccgatggatgagcgcgtgctgatcaaagaagttctggaagaattaaaagagaaataagattgtgtttgcagatgttattgtagatatacaacatgaaaaactggataagatctttcagtaccgaataccggaacgactgaaagacgagctgtatccggggctggaagtaattatcccttttggaaaaggaaaccggcagatcaaaggttatgtgacttcattatcagagacttgcaattatgatctgtcaaaggtgaaggagattacagacatttccagaaacagtgtggcaatcgaagcgagactgatcgcgctggcggcatggatgaaagagcagtatggcggaacgatgatccaggcgcttaagacagtgttgccaatcaagcagaaggagaatgcgaaggtaaagaaacatctccgtttgctgcttactgaggaagagagtcaggagaagctggctttttatcagaagaagaatcagaaagcaagagcaaggcttttggaagctttgaaggaagccccaattctggattatgagctggtgacgaaaaaattaaatgtgacactgcctgtaatccgggcattggaagagcagggcgtgttgaagatagagtcagagcaggtataccgtaatccggtgaaacaggcaaagaaatcacaacaggagatcatctatacggaagaacagcagcatgtgatccaggggttccggcaagactatctgtgtggaacaaggagaacttatctgcttcacggagtgactggaagtggaaagacagaagtctatatggagatgatccgcacggttgttgaccagggaaaacaggcaattgttctgattccggagatcgcactgacctatcagacagtgatgcggttttaccgctgtttcggcgacagagtttctatcatgaactcaagattgtctgccggagaacgttacgatcagatgatgcgtgcgaagaagggcgagatcgatgtgatgatcggaccacgttctgcactttttactccatttccggatttggggctgatcgttattgatgaagaacatgaaccaacctacaagagtgagcaggtgccacgttatcatgcaagagaagtagcaatccacagggcagaagtagaagatgcaagcgttgtgcttggaagtgcaactccgtcaatggaggcaatgtatcgggcaaggcttggtgagtatcagctttacgagatgaagaatcgttctcatatgcagcagatggcgactgtgcatacagttgatatgcgaaaggaactgaagaatggaaaccgttccatcttgagtgagaagttgcaggaactgattgaagacagactgaatgcaaaagagcagatcatgctgtttttgaatcgcagaggatattctggttttatttcctgcagagaatgtggccatgtagtgaaatgcccgcactgtaatgtatccttgtcggtacataaaggcgggaaaatggtctgtcactactgtggttatgaacagccgaaggtgacggaatgtccggaatgcggttcccgttatatcggagaattccgcgcaggaacccagcagatcgaggacatggtgaaagcaagatttccacaggcaagagttctccgtatggatatggatacgacgaagaaaaaggattcccatgagcagattttatctgcctttgcgaatgaagaggcggatattcttgtgggaacacagatgatcgtaaagggacatgattttccaaaggtcacattagtcggtgcattggcagcagatatgtcactttatacagatgattatcgttccggtgagcgaacatttcagcttttgacacaggcagcaggccgtgccggaagaggtgacagaccgggtgaggtcgtgattcagacttacgatccggagcattatgcaatcgaggcttcagcagcgcaggattatgaagcattctatgagaaagaaatccgttaccgcagtctgatgggatatccaccggtggagaacctgatggcagtacttgcagcatgtgaagatgaggtgcttttagagaaagcgtgcaagtatctgaaggaatacattttgcggatcaaaggtcaggcacagctcgatgtgatcggcccggcaagtccgggagtggataagatcaaagatatttaccggagggtgatttacgtaaaagcgccggaataccgaaccttagttgtattaaaagacaggatggaacaatatatagaaattaactcagggtttcagaaaatgagaatccaattcgattttaacccgatgaatttatagaaaagagaggaaagaataatggcaatcagagaagtaagagagatgggcgatgatgttcttgaaaaaaagtgtaaaccagtgacgaagatgacacttcgtacaaagattttaattgaagatatgcttgatacgatgtatgagaagatgggggtgggtcttgcagcaccgcaggttggtattctcaaacagattgtagtgattgatgtcggagagggtccgatcgttttgatcaatcctgagattgttgagacatccggtgagcagacaggcgaagaaggttgcttaagtgtgccgggaaaatggggaatcgtaactcgtccaaattatgtaaaagtacgtgcacttaatgaaaatatggaggagtttgagatagaaggagaagaacttcttgcaagagcgttctgtcatgagatcgatcacctgggaggacacctttatgtagagaaagtagaaggagaactgcatgattcaccggcctacaacgaggaagatatggaatacgaagtggaggaataattgatgagaataattttcatgggaacaccggacttctccgtgggaacactggaggcactggtggaagcaggacatgaggtatgtctcgtagtgagccagccagataaaccaaagggacgcggtaaagagatgcagccaactccggtgaaagaagctgcgatgaaacatggaattccggtttatcagccaaagaagatccgtgatccggaatgtgtagaagaactgagaaaatacaatgcagatgtgatggttgtcattgcatttggtcagatcattccgaaagaaattctggagatgacaccatacggatgtattaatgtacacgcatctctacttccgaaataccgtggtgccgcgccaatccagtggtctatcatcaatggcgaggaagtgacaggtgttacaacaatgcagatgaacgaaggactggatacaggcgacatgatccagaaggttgaagtgccgatcacagaagatgagacaggagaaagccttcatgataagcttgcagaggcaggagcaaagctttgtgtagagactctgaaggctattgaagatcatacggcaactttcgagaagcagggagaaagcccgacagaatatgccagaatgctcgataagaagcttggaaatattgactggaatacatccgcagtacagatcgaacgtctggtgcgtggcctgaattcctggccaagtgcttacacacattgggacaaaaaggtagtgaagatctggagagcaaaagcagaggctgatggcacggtaaaagcagagcctggaacagtgttgagtgtagagaaagattcctttactgttcagacaggggatggcgtcttacgagttctggaacttcagattccggggaaaaagagaatggatacaggagctttcttaaggggatacacaattgaaagcggagttaaatttacacgggaataagaggacttctggagggggactgcagatagataacaggaggtagttttagtatgtattatggattttattatgactggacttatatactggtactgatcggtgtggttctcagcctgctcgcatcatcccaggtgaaaggaacatttgcaaaatattcgaagatccgcagttattcagggatgacaggacgagaagcggcagaacagattctcagaagaaatggaatctatgatgtgcaggtgactcatattgcgggaaatctgaccgatcattatgatccgagaaacaagacactggcactttctgatccggtttataattcaacttctgtagcagcaatcggagttgcggcacatgagtgtggtcatgcagtacagcattttgaagggtatgcacctttatcaatccgtggggcacttgtgccggtcgtaaatttcggttccatgatttcctggccgttgatcattatcggcctgtttatgaatggccagatgtccagcttccttattgatatcggaattctgctctttatggtagctgtggcatttcatcttataacacttccggtggaaatcaatgcttccagaagagcggtgaaggtacttggaaattcaggaatgctccgtgaagacgaagttggtggagtgaagaaggtacttcgggcagcagcaatgacatatgtggcaagtgcggccgcaatgattttacagcttttacgtttgttgatcctgacaaatggacgaagaaggaatgactgataaaaagaaaaaatgctgtaactgttcagagccaacctccaaaatgcggagaataggagattatttatgggaaagcagatcaatgaacgcgaggtcgttcttgagattttgatggaaataacagagaatggagcatatagtcataagattcttggcgatgttctgtcaaaatatcaatatcttgagaaacgtgagcgtgcatttattaccagagttgtggaaggtactctggaacatatgatagaaattgattatattttgaatcagatttctaagacaaaggttaagaagatgaaaccggtcatccgtaatcttcttcgtagcagtgtctatcagctgaaatatatggatagcgtaccggatcatgcggtgtgcagtgaggcagtaaagcttgcggttcgaaaaggattttcaggtctgcggggatatgtgaatggagttctgagaaatgttgtccgcaagatggatgagatcgagtatccaaaagaagatgtacagagattgtctgtgaaatattctgtcccggaatggattctttctttatggaagaaagaatatggggaagagattacagagaagatggcagcagattttcagaaagagaagccgattacgatccgatgttgtatgaaccgggttacaccggaagtattgaaagaaaaactggaagcagaaggagcgaaagtagaagcacatccgtatcttccttatgcgttttatctttcagattatgattatctggaaggtctggaaagttttcaggaaggactctttgcagtacaggatatcagttctatgtttgtcggagaactggcagatccaaaagccggcgatcatgtaattgatgtctgtgcagcaccgggaggaaaatcacttcatgtggcagagaagcttcagctggcagatgaagtggcggcgagagagaatggaacagaagaaaagacaggacgggttgaagcaagagatctgactgaatataagacagatctgatttggcagaatatcgaccgttccggacttggaaatatttgtgctgtatgcaaggacgcttctgtatttgatgagtatgataaggaaacagcggatcttgtgattgcagaccttccatgttcaggtcttggcgttcttggcaaaaaaccagatctgaaatatcgcgtacaaccggaagatcttgaagaacttgcagatttgcagagaaagattctgacttgcgcacaggcaatcgtcaaggatggcggcacattgctgtacagcacatgtaccgtaaatccgggagaaaacatggacaatgtacactggttcttgaaagaatacccacaatttgaactggatgatattacagaaaatctttgcaaggagttacgaagtgatgtgatcgagaagggatgtatccaattcttcccgggagttcacgattgtgacggattctttattgcaagattaaagaaaaagcatgattttcaggaaatgtgaaaaaatagaaaaagcaaacaaataatgtgaataactcacagaaaaaacgaaatacaggaggaaaactttaagatgaagaaggatatccgtgcttatggatatgaagaattacagaaagagatggcggcgatcggagaaaaagcatttcgtgcaaaacagatttatgaatggctgcatgtgaagctggtagatcattttgatgagatgacgaatctttcaaaggctttgagggaaaaactggaagagaattatgagattctcccggttgttatgcttgagagacagatttcccagattgacggtacgaacaaattcctgttccgtctctacgatggaaatgtagtcgaaagtgttcttatgaaatataagcatggaaattctgtctgtatttcctcccaggtcggttgcaggatgggatgtgcattctgtgcatcaacgatcggaggtctggtgagaaatctttctccgtctgagatgcttggacagatctatcagattcagaagataagtggtgagagggtttcgaatgtggtgatcatgggaaccggagaaccgatggataattacgataatttcctgaagtttattcatttacttacagatgagcatggactgaatatcagtcagagaaatgtcaccgtatcaacctgtggaatagttccaaggatgaaagaactggcgaaagagcatttacagattacacttgcactttcgcttcacggttccaatcaggaaaaacgaagaaaattgatgccggttgcaaataaatatgatatcacagaagtactcgcagcctgtgacgaatatttcaaagaaaccggccggagagtgagctttgagtacagtcttgtacatggtgtgaatgatacggatgaagatgcacaggaactgattcatttattaaagcataagaactgtcatatcaatctgataccggtcaacccggtaaaagagcgtgattttgttcgtccaagccggaaaagtgctttgaatttcaaaaataaacttgaaaaaagcggaataaatgttactataagaagggaaatgggctctgatattgacggagcctgcggtcagctcaggcgccgctacgtagaaactgaaggagaatagaaggtatgaagacattttcaattacagatgttggaatggtgcgacaggtaaatcaggactacgtctttacgacgggaaaaccactgggtattctccagaacctgttcgtggtagcggatggtatgggtggccatcaggcaggagattatgcttccaagtgtacggtggaagtgatgatcaaagagattgcgaagagcgagggtgaggatatcgaacgtgttcttgtgaaagcaatcaaggctgccaatcgtgagattatcaaagaagcatccggtgacgaacatctgaaggggatgggaacaacggttgttgccgctactgtgaaagaacagatgctgtattttgccaatgtgggagacagccgtctgtatctgatcaatcagggaatccaacagctaagtaaggatcattctcttgtagaagagatggttcgtctcggtggaattaagccggaagaagcgaagcatcatccggataagaatattatcacaagagcgatcggtgcaaaagctgatgtggatgtggacttttatgaacaccgtctgaaacggggagacatcattctgatgtgtacagacggattaagtaatatggtggaagatgaagaacttttccatattgtgcagggaagcagggatatcgtcgaggcaggtgagatgctggtggaagcagcaaaagagaatggaggaacagataacatcggagtggtattgtttgagccatttgcagatgaggtgagtgtatgattaaagaaggagtatttttagggaaacgatacgagatacttggtcgtatcggttctggcggaatggcagatgtctataaaggcaaggaccataagctgaatcgttttgttgcgatcaaggtgttgaagagcacatatcgttcggatgagacgtttattaagaagtttttaagcgaagctcaggcagcagcaggattgatgcatccaaacgtagtcaatgtctatgatgtagggcaggatcgtggtctttattatatggtcatggagcttgtagaaggaattacgctgaaggattatatcgagaagaaaggaaagctttcagcaaaagagacgatcagtatttctattcagatggtgacaggcattcaggcagcgcataactgccatatcattcaccgggatattaagccgcagaatattattatttccaaagatggaaaggttaaggttactgatttcggaatcgcgcgggctacgacatcaacggcaacgcaggcagtaacaacaacggtgatgggatctgtacattacacatctccggaacaggccagaggcggtattgtagatgagaagagtgatatctattcagcaggtatcacgatgtatgagatgatcaccgggcatgttccgtttgacggagattcgacagtgacggttgctttgaaacatttgaatgaagtgattaagtctcctgcagaagaagtaccggatattccgtacagtctggagtgcattattatgaaatgtacacagaaactgccgaataaacgatatatgagctgtgaggaactgcttcaggatctgaagcactcactggtagatccggatggagattttgtagttcttgatggtgtgacaaaacgtatgccggcagcatcccaggatacaggacggaccacggttgttatgtcacaggatgaactgaatcgtatgaagaatcgtcagaattataatgatgattatgacgacgattacgaggatgactatgacgattacgatgaccgccgcagaagccgttatgatgatgacgatgactacgacgaccgccgcagaagtcgttatgatgatgacgatgattatgatgatcgccgcagaagccgttatgatgatgacgatgattatgatgatcgccgcagaagccgctatgatgatgatgattacgacgaccgccgcaaagaccgttatgatgatcgccgtaagaaaaatgaagtgaataaagacacgaagaagatcatgaagattcttatggttgttgccggtgttgtgatcgcacttttgatcatgttccttgtaggaaatgcagtgggcgtatttaaaggtggaaaaggaacgactacacaacaaacagattcagagatggtaaaagtaccggatgtgacaggcaagacatatgaggaagctcagaaagaactgaacaaatatgatctcggaatccataagtcaactgcgccttccgatactgttgcaaaaggaaagatcatcagccaggatcctgctgatggaaagaaagtaaagaagcatacaacagtcaatgttgtgatcagcagtggtgaagaagctaagatgacaacgattccaaatgttgttggaatgtcggaagctgatgcagaaaaagcacttcaggataagaatcttgttgtgaagaaaggtgatccggtctacagtgatgatgtggaacagggagaagttgtttctgtcagtccgagtgaaggtgcagaagtaaaagaaggaacaacggtcactcttgtaataagcaagggaaatcagccggcaacagttcctaaacttaccggaaagtcccagtcggatgctgaagcagcactttcacaggcaggtttgtccggaaatgcaactgaagattacagtgatactgtagaagaaggagttattatttcacaggacacagatgccggaaaagaagtatctaaaggtacaacaatcggatatgtggtgagcaaaggaccaaagatgacggtggttacagtaccggatctttcctataaagaccagaatacagcggaaaaactgttgaagcaggcaggacttacaccggagtatattggtgaagattatagtgatgaatatccagaaggacaggtattctatcagtctgttagcagtggtacgcaggtagaaaaaggaacaactgtccagtatatggtcagcaaaggatctcagccatcagatccggatagtggagattccggaaatgattccgggacagaagagaacacgaatcaatgataacagagagcaagtatatgcagggaaagataataaaagggattgccggattctactacgtgaatgtagtagaatccggaatttttgagtgtaaagcaaaaggtgcttttcgaaaagacgggatcaagccgttggtcggtgatgatgctgtgatcgaggtacttgatgaaaaagaaatgacaggaaatatcacagagatcctgccgcgtaagaatgagttgattcgtccggcagtagccaatattgatcaggcactggttgtgtttgcggtgacaaaaccgaaaccacattataatctgttggatcgttttcttgtcatgatggaacgaaaagagatacctgtcgtattatgttttaataagacggatattgccagtcatcctgaaattgcagaattgaaagaagtttataccggatgcggatatccggtaatcttcacaagtgcgaaggaagaagaaaatatcagtgagttaaaatcacttttaaaaggaaagacaacttcgattgcaggtccttccggtgttggaaaatcatccctgatcaatcttctgcagtctgaagtgaagatggagacaggaagtatcagtaagaagattgaccgtggaaaacatacaacaagacattccgaactgatcgtgattggagaagattcttatattatggatactccgggattcagttctctttacgttaatgatttcgaaaaagaagatttaaaatattattttccggaattcacaccgtttgaaggacagtgcaagttcaatggctgtgaccatattcatgaacccggatgcgctgtaaaagaggcagttgaagaagggaagatccataagatcagatatgaagattatacggagatgtaccgtgaactaaaggaaagaaagaggtattaagtttatgaaaaatattttggcaccatctattctctcagcagatttcaagattttaggagagcagttgaaattaacagaagaagcaggcgcagagtatattcattttgatgtgatggatggaatgttcgttccaagcatttcctttggaatgcctgttctcgcatcgatcaagggagcaacaacacagacactggatgttcatctcatggtgacagaaccgatccgttatgtggaagaattcgtgaaagcaggagcagatatcgttacagttcattatgaagcatgtgaagatctgcaggcaacaattgataaaatccatgcagcaggagcgaaagtgggaatttctattaaaccaaagacaccggttgatgtactgcttccatatctggatcaggcagagatgtttctgatcatgtctgtagaaccgggattcggcggacaggcatttattccggaatcactggagcgtatcagtgaattgagaaaccttctgaatgagaaaggacttacaactgatattgaagtagatggtggaatctatcataaaaacgtggcagaagtacttgcagccggagcgaatgtaatggtctcaggttcaggcgtttttaaaggtgatatcaaagataatacagcaaagtttatggagattttaaacggcaatgtgtaagagaacagttattgtgagcgggggaatgctggaagaagattttgtccttccgattcttgaggcagaagagacagaatttattatcggagtagataaaggactcgcatttctttatgaacataagatcaagccggattacattgtgggagattttgacagtgtaccggaagaagtgatcgattattatagaaaagaagcaagtgtaccgatccgggagttcaatccggtaaaggatgcgtctgatacggagattgcacttcgtatgtgtcttggactcagaagaaaagaaatctggattcttggaggaacaggaaatcgtctggatcatttctgggctaatgttcagtgcctgaatattgcacttgaagcaggatctcaagcgatgatcttagacagtcataatagaattcgtctgcttgatcatggaatcgcaattcgcagagaagaagctttcggaaagtatttttcagtatttccgatgcaacttccggttgaggatttctgtatcagcggtgcaaaatatccattgcagaatcatttgctctcatcaggagacagcttgtgtgtgagtaatgagtttgcagaaggtgaagatgaagtgaagatctctttcgtgtttggaaaagtgattttgatggagacgagagattgaaattcaagccccattatagtataatattagatgctattttggggcttctttttgtgaaagagtcacataacagaaaataagagaaatagaccttgtggatttagctttagaaatcaaggttttaaggaggaaatagagaaaatgaaacttggtattgtgggattaccgaacgtaggaaaaagtacactgttcaattcactgacaaaggccggtgcagaatctgcaaactatccattctgtacaattgacccaaatgtcggtgtcgtaacagttccggataagagactggatgtgcttggagagatgtatcatacaaagaagatcattccggcagcaatcgagtttgttgatattgcaggacttgtgaagggagcatcaaaaggagaaggacttggaaaccagtttcttgccaacatccgtgaggttgatgcaatcgttcatgtagtaagatgctttgagaatactaatatcgttcatgtagacggaagcattgatccgctgcgtgacattgagacaatcaaccttgagctgatcttctcagatcttgaggttcttgaaagaagaatctccaagacagtgaagctttcaagaaacgataagatggcggcgaaagagctggatcttcagaaccgtctgaaagcgcatctggaagagaataagatggcgaagagctttgtgacagaggatgaggatgagcaggcatggcttgcagagtataatcttctgacagcaaaaccggtaatctttgcagcaaatgtatctgaggatgatcttgcggatgatggtgtgaacaacgcaggggttcaggcagtccgtgagtatgcaaaagcggaagactgcgaagtgttcgtagtatgcgcagagattgaagaagaaatttctcagttagatgacgatgaaaaatcaatgttccttgaagatcttggattggaagaatccggacttgagaagctgatcaaggcaagctatcatcttcttggactgattagttatttgacagcaggtgagccggaagttcgtgcatggacaatcaagaagggaactaaggcaccacaggcagctggtaagatccatacagactttgaacgtggatttatccgtgcggaagtagtaagttatgatgatctgatggcatgtggaactcatgcggcagcgaaagaaaaaggattagttcgtctggaaggaaaagactatgtcgttcaggacggagatatcatgctgttcagatttaacgtttaacagatatagggaatatgcttaaaaaccggttagattcattgttttctaattggaaaagcagtaaaaacaggaatcagggacaactagatttgttcctgatttctgtggatatgaaaggaaataacataatatgcattacaatatcagctttccgaatttagggatttatctggatcatgtaggaaaaagcatcagcatctttgggttttccattgcttactacggcatgatcatcggtgcagcaattttgattggatttctgattgccacagcggaggcaaaaagaacaggacaaaatccagaagactatctggatatgggaattgtcggagtgatcgcaggaattgcgggtgcaagaatctattacgtgattttctcctgggatttatataaagataatcttttgtctatctttaatctcagagaaggtggactggcaatttatggcggcgtgatcggagcagtgatcgcagtttttgtgatggctgctgttaagaaaaaatcaccatttcagattttggatacaattgcactggcgcttctgaatggtcagatgcttggacgttgggggaatttctttaacagggaagcatttggagaatacacggattgtctgtttgcgatgagacttccggttgatgcagtaaggccgggagatatcacagaacttatgcgcgagaacatgcagagaattgacggagtcagttatattcaggtacacccgacatttttgtatgaatcattatggtgtgccggacttcttattatattgtttctgtataggaaacataagaaatatgaaggtgagctctttcttatgtacctgtttggttatggggcaggacgcgtgtggattgagcggcttagaacagatcagcttgttcttccgggaatcggatttccggtgtcagaacttctggcaggttgtctggtgattgtgacaggaattatgctgatctattgcagaaggcattgcagaaaaagaaatgagaagaaaaaagtggatcagtatgagccggtgccgacaaagatcaaagggaaaaaaccaccgaagtgggatgaccggttgtttaaaaacagatagaatgataagaaaaaagtatagtgattcataagccggaagagttaatgttcaacagaaagtactcttctggcttttcctatttctgcctgttttagttaataatccccaataacagcactgataactattctcaaaacactgcgctgtacacgaaaatatacaaaagaggatatttataactctagacttttgtgacttttggagatataatgaaactacatgtgaattaattatacttaactcagtgtaaaacctatgtaacacctaaggaggaataaaaatggcaagaaaaatgaagaccatggacggtaatcaggcagcagctcacgtttcttatgcatatacagaagtagcagctatttacccgattacgccttcatccgttatgccggagcatatcgatgagtgggctactgaaggaagggagaacattttcggacagactgtacaggttacagagatgcagtccgaggccggagcagcaggtgctgttcacggatcattagcagcaggtgctcttacaacaacatttactgcttctcagggactccttcttatgattcctaacttatataaggttgctggtgagcagcttccgggagtattcaacgtatctgcccgtgcacttgcaagccacgcactgtcaatttttggagatcattctgacgtttatgcatgtcgtcagacaggagcagctatgctctgtgaatccagcgtacaggaagtaatggaccttactccggttgctcattgtgcagcacttgaaggaaagattccattcatcaacttctttgatggattcagaacatcacacgagattcagaaaatcgagacatgggattatgaagatctgaaagacatggtaagcatggaagcaatcgacgagttccgcgcacatgcacttaacccgaaccacccatgccagagaggttcagctcagaacccggatatcttcttccaggctagagaggcttgtaacccattctatgatgcacttccgggaatcgttcagaagtacatggataaggttaatgagaagatcggaacagactacaaactgttcaactactatggagcagcagatgcagagcacgtgatcgtagctatgggatctgtttgtgacacaatcgaggagacaatcgattacctgacagctgcaggagagaaagtcggagttgttaaagttcgtctttacagaccatttagcgcagaagctctgatcgacgctatcccggatacagttaagaagatttctgttcttgacagaacaaaagagccaggagcacttggcgagccactgtacctggatgttgttgcagcacttaaaggatctaagttcgatgcagttccggtttacacaggacgttatggacttggttctaaagatacaacacctgctcagatcgttgctgtataccacaacgatgagaaagctaaattcacaatcggtattgaagatgatgttacacacctttcacttgatgctggtaagccacttgttacaacaccagaaggaacaatcaactgtaagttctggggacttggagcagatggtactgttggagcaaacaagaactccatcaagatcattggtgataacacagacatgtatgcacaggcttactttgattatgactctaagaagtctggtggtgttacaatgtctcaccttcgttttggtaagaagccaattaaatcaacatacctgatccatcaggctaactttgttgcatgtcataacccgtcttatgttaacaaatacaacatggttcaggaacttgttgatggaggaacattccttctgaactgcccatgggatatggaaggacttgaggagcatcttccaggacaggtaaaagcttatatcgctaaccacggaattaaattctacacaatcgatggtatcaagattggtaaagagatcggacttggcggacgtatcaatacagttcttcagtctgcattcttcaaacttgcagctatcattccggaagaagaggctattgaccttatgaaagcagctgctaaggctacttacggaagaaaaggtgacaagatcgttcagatgaactacgatgcaatcgatgctggtgcaaaacaggtcgtagaagtagaagttccggaaagctggaaagatgcagctgatgaaggacttgccacaccacatatcgcagacggcggaagaactgatgcaattgcatttgctaagaatatccaggcaaaagttaatgctcaggaaggaaatacactccctgtatctgcattcaatgattatgttgatggatctacaccgtcaggaacatctgcatatgagaaacgtggtatcgcagtagatattccggtttggaatccaaatcagtgtatccagtgtaaccgttgtgcatatgtatgtccgcacgcagttatccgtccggtagctctgacagaggaagaagttgctcaggctccagaaggacttaagacacttgatatgatcggaatgccgggaatgaagttcacaatgacagtatccgcttacgactgtacaggatgtggatcttgtgtgaatgtctgcccaggaaagaagaataaagagacaggcgaagttgagaaggctcttacaatggctaacatggaagctaatgcaggagagcagacattcttcgactttggtagagagattccggttaaaccagaagttgttgctaaattcaaagagacaacagttaagggaagccagttcaaacagccactccttgagttctcaggagcttgtgcaggatgtggtgagacaccatacgctaagctgatcacacagctgtttggtgatagaatgtatattgcgaatgcaacaggatgttcttctatctggggtaactcttcaccgtctacaccttacacagtaacaccggaaggtaaaggacctgcatggagcaactccctgtttgaggacaacgctgagtttggatacggtatgctgcttgcacagaatacaatcagagacagactgaaagcaaaagttgagaagatcgcagagaagactacagatgaggcagttaaggctgcagcagctgagtatcttgagacatatacagtaggcgctacaaacggaacagctacagacaaacttgttgcagctcttgaagcactcgattgcgattgcgaagagagagcagaagttctgaagaacaaagatttccttgctaagaaatcccagtggatcttcggaggagacggatgggcttacgatatcggatacggcggagttgaccacgttcttgcaagcaagaaagatatcaacattatggtattcgatacagaggtttactccaacacaggtggacagtcctctaaggctactaagactggtgctacagctcagttcgcagcaggcggaaaagagactaagaagaaagaccttgcaggaatggctatgacatacggatacgtatacgtagctcagatcgctatgggtgctgacttcaaccagacagttaaggcaatcgctgaggctgaggcttatccgggaccatcactgatcatcgcttatgctccatgtatcaaccatggtatcaagaagggtatgagcaaagctcagacagaggaacagctggcagtagagtgtggatactggaataacttccgttacaacccggctgcagagggagacaagttctcacttgacagcaaggctccgaaggcagaaggataccaggacttcctgaatggtgaagtacgttacaacgcactgaagagagctaacccggctaaggctgacaagctcttcgctctcaatgagcaggaagctatggagagatacgattacctgaacaaactggtaactgtatacgctgcagaaaaagaagataaataaggatatttcatgagtgaatgagatatgaaaagaggagatctccgtaaggggatctccttttgcgtgaaaaaatgatggggttgacctgtttcacaatttttgattacagtggtgcgcgaagatatttcttcggtgtcattcctttatattttttaaatgttttgataaagtagcttacatcgttaaatccacagctaagtccgatgtctgcgattgattcattcgaagtaacgagcttgaaacaagcttgttctattctatagtaattcagatagtcaacaggagttctgtgtgtcatatctttaaagtagcgacagaaatattttgaattcataccggctgcctgagacagatcttccagtgtgatacagtcagcataatggttttcaatcacttcaagagctttctttaaatgttctatttttcggctatccttttgactgatgattcgaacgttttcatacaatttattttccaaaatatagcctaagaattcgtacagagtaccaatcaccataagctcgtgcccttcggtacgctttttgatatgttcaaacatcatggaggtgatatgctctaaattctttacgggtgctttgataagggaagggatagtcagagtgtcacttccgatcttcttaagcagacgttcgctggcatgatttactgccatgagcgattcaaggttaaaaacaaggcattcatagacacaatccttaggaattccaccatgaagaagccctccttttataaaaataaggtcgccggctactgcagtgaattcattttcaccaattgacataagtaatttcccttttaaaacacgaataagttcatattcgatgtgccagtgataagacatttcataccgtggatgattcggcgtaacatgataaaattcaattggaaaatcaatggttccgtgattacgttcttctctgtaattgatgtatttcatgcaataatctcctttaaaaatctaaatagtgtaaaaacaaacatatatgtggaaatatatgtttataaattgtactttgttgtataaaaggtgaatatctttatatttttattctagtataccacaagacaaaaagaaaggaaagaactataatgatactcaaagaagcggttctgcgaaggaagataagcagagcaaggcaaacaattaaggaggaatgtaattatggcagaaagaagattagtaggatcttatccagtaattggtatcagaccgacaatcgatggacgtagaggagctcttgacgtaagaggatctcttgaagagcagacaatgaacatggcaaaatcagcagcaaaactgtttgaggagaacttaagatattcaaatggtgagccagttaaagttgttatcgctgacacaacaatcggacgtgtaggtgagagtgctgcttgtgctgataagttcagaagagaaggcgtagatatcacagttacagttacaccttgctggtgctacggagctgagacaatggatatggatccacagacaatcaaagctgtatggggattcaacggaacagagagaccaggagctgtataccttgcatctgtacttgctacacatgcacagaagggacttccggcattcggaatttacggacatgacgttcaggaagctgacgacacaacaattccggaagacgttaaagaaaaacttctcagattcggacgtgcagctgttgcagcagcatccatgagaggaacatcttaccttcagattggatctgttacaatgggtatcggtggatctatcatcgattctgatttcatcgagtcttaccttggaatgcgtgtagagtctgttgacgaggtggaaatcatccgtcgtatgtcagaagagatctatgacaaggctgagttcgagaaagctcttaaatgggcaaaagagacttgcaagattggttgggataagaacccagaagagcttcaggcttctccagaggagaaagaggagcagttcgagttcgttgttaagatggcagttatcatcaaagaccttatgaatggaaataagaaccttgatgagaagttctcagaggaagcaatcggacataacgctctggcagctggattccagggacagagacagtggacagacttctatccgaacggagacttcgcagaggcagttctgaatacatctttcgactggaacggagctcgtgagccatacatccttgctacagagaacgacgttctcaacggacttggaatgatgttcatgaaacttcttacaggacgtgctcagatcttcgctgatgttcgtacatactggagcccagaggcagttaagaaagctacaggatatgaccttgagggtgttgctaaagagaacggtggattccttcacctgatcaactctggagcagcttgtcttgatgcatcaggtgttgctaaagacgagaatggtaacggcgttatgaaagaatggtggaacgttacagaagaagaccagaaagcaattatggatgctacagagtggtgcatggctgacaacggatacttccgtggaggtggatactcaagccgttatgagacacgtgctcagatgccagctacaatgatccgtcttaaccttgtaaaaggacttggaccggttcttcagattgcagaaggatggacacttgaacttccagaagaagtatctgataagctttggaaacgtacagactacacatggccatgtacatggtttgctccaagatgtgatggtaaagagggagcattcaagacagcttatgatgtaatgaacaactggggagctaaccacggtgctatctcctatggacacatcggagctgacctgatcacaatgtgttcaatgcttcgtattccagtatctatgcacaacgtaccggagaaagatatctaccgtccggcagcatggaatgcatttggaatggataaagaaggcgctgacttcagagcttgtaagaactacggaccactttacaaataagaatgagtccttttgtcaggaaatgtaaaaagactgtaaatacagtttcgatacagagctagaacaaagaatgcggggggtctgcctatgcagggcccccgctttaataccgactaaaagagtattaagaaaagaggaagattatggagaaaaaagtattagcatttgactttggtgcttcaggcggaagagcaatgtgcggaacttttgatggtgacaagatcagcattgaagaacttcaccgtttttctaacgatccggttattttgaatggatcaatgtactgggatgtactgagattattttttgagatcaaacagggtctgatcaaagcaaagaaatgtggaaagatcgaaagtatcggtatcgacacatggggagttgattttggactgatcgacgaggaaggaagacttcttgagaaccctgtacattaccgtgatgcacgtacagaaggaatgatcgaagaaagtttcaaactgatcgataaagagaaattctaccagatcacaggaaatcagttcatggatctcaacacagcattccagctcctttctcttgtaaagacaagaaaagagcttcttgaaaaagctgacaagatgattttgatgccagaccttttcaactacttccttacaggggagaaaaaagctgagtattctatcgcttctacaacacagcttcttgatgcgaaaaagggcgagtggtcagatgaagtgatcgaagcactgggaattccgaaacatattttcccagaaatcgtacctacaggtacaaagatcggcactcttacagatgaaatctgtacagagcttggtctggataagattgatgttatggctgttgcaggacatgatacgcagagcgcacttgtatctgtaccaacatcagaagaagattttatcttcctgagttgtggaacatggtcactgcttggaacagagcttgcagaacctattatcaatgagaaatctgagcattacaacatcacgaatgaaggtggatatggaagaaagatttccttccttaagaatatcattggattgtggtgtattcaggaaagccgtcgtcagtggatccgcgaaggaaatgagtacggatttggcgagcttgagattatggcaaaagaagctccggcacttcagagctttattgatccggatgcaccggaattcacacctgccggagatattccgacaagaatccgtgaattctgcaagaagacaggacagcctgttccggaaacagtcggagaagttgttcgttgcatcaaccagagtcttgcaatgaaatatcgtcatgcgatggaagagattaaagagtgtacaggtaaagattataagacggtctacatggtaggcggtggaacacagagtgctcttctttgccagttcacagcaaatgcatgtggatgcagagtaagtgcaggtccgatcgaggcgactgttctcggaaatattgcactgcagctcatggcttccggagatatcaaatctatcgaagaagcaagagaaattatcaaacgttctcaggacatcaagatctacgagccacaggacaaagaagcatgggacgaagcatacgagagatttaagaaaattttagtatagtgctttgaactaagggggaatgggttgccagttgtagtgtaattatggcgttgctggtcgcacatcgtgtgaacagtaacattatggctggcaacgtaataaaaaagaattcttcagaaatacttgactgtcaatctgctgtatgatttaatggaatgagcagttgagttgggcaaaatgcataacggttcgctaattggcctgggaggagaagattatggctgctactattcgcgatatcaagaaaaggacaggattgtcccttgcaacgatatcgaagtatttgaatggcggtaatgtattgccggaaaatcgtatcttgattgaggaggcaatcaacgaactgcattatgaagtgaacgagctcgcaagagggcttgttacccacaagacaaagacgattggagttctggcttatgatatacagtgtctttttgtaggaagtatgctgcattatctgggaatggaacttcataaaaagggatatggaatgttgatctgtgattcctgcaatgacgagaagctacagaaagaaaatctgcagtttcttctgagcaggaaagtagatggaatattggtatttgctgtaggtatgcatggaaagtttcttcatgctgcgaaaaaagcaaatgttccggttgttctggttgacagatcattccaggatgaagaatatgattgcgttgaggttgataaccggacagcaatctatcgtgcaacaaataaattaattgagaaccatcacaagaaaatagctgtgattgcctctaatattgaatataccggaagggaacgtgtgaaaggatattctgatgcgatgaaccaggcaggactggagattccaaaggaatactgtaagctgggaaggcattcttttgaacatgggtacagaggaatgaaagaacttttggagcttgaagaccgtccgaccggtgtgatcttaggaaactataacaccatgcttggtggaattatggcattgaacgaatcaggactctcctgtccgcaagatgtctcgctcatcggagtggataatcttccgatgacccaggtgctgcgccctaaattatggctgattgtccagccaatggaaacgatgtgcgagaaggctgtagctatgctcctggagcgagtaaatggagagcaaaacggtatgccggtaaaaattagtttcagtacctctgtaagagagggagactcaatacgagaccttggatagtgcataagcaaaatgcacagaaaagcgtggtttttgttgtgagaatggataaaaatatagtgaaaacaaacaaaaacgaaccgtttcgctctaaaaacggtgggaaatcttgacaaaacgtggagacaaagctataatttattcatgtatcaaaggtgtgcgggaaaattgaaaacacactttgaaaaacaaaaaaatcttaaagctttgaaagcgaaccgttacgctgaggttaagaggaatgggggtatcgtaagagttaatcgacaatccagtcaacaccagcaaagtaaaagatgggaggaagaaaattggaaaaaattaaacaaaatccttttgtaaaaaaggtaggatttaacagaattgttttgtgctgtgtccttcttctgatgtacggactcttctgtgcactgaccggaggaagcttcgcaggaatgaaccgaatcatgagcgcactcaattatgcttatttccttggatttttatcactgggtgttacatttgtaattgctacaggacagatcgacttctctattggaccggttatgttctgttgtgcacttatctcaggttatacactgacaacacatggaatttccatgccggttgcaatcctgatcagtatccttgtgggatttgcttttggtctctttaatggatacctggtagcttactggtcagtaccttcattcatcacttcaatggcaagtatgaatattgcaaaaggtcttgcgtcagtttacacaaagacacagtcagtcagctggccacaggcagcagatccggacaacggatggttcagaaatcttgtgacatataacggattcccggttggacttgttattcttctggtagttgcagttgtctgtgcgattatcctgaacaagacaagaatcggacgttacatcctttgccttggtagtaacaaagaagctgttagactttcaggtgtagatgttaagaaatgggaaatgcttgcattcattatctgtggagttctcgttggaatgggcgctatcttctatgtatctgcatatacaacagtacagcctggttatggagatcagtacaacaacgaagcaatcgccggatgtgtaatgggtggtacatccatggcaggtggacttgcatccatcagcggtacaatcattggtgtatttatcatcgctcttcttcaggaaggaattctggctcttggctttacaaaagattatcagcttatcattacaggtgttattgttatcgtcgcagtattcagtgacgtacttgcaagacgcagaaagaactaatttctcttctataataagagatcagctttatgaatgatgaacgaaatgtttgattgaaagaaaggcaagggtaataaaatgggcgaagttatattggaaatgaaagggattgataaatctttcccaggtgttcacgcacttgaccatgtagatcttgagatcagaaaaggcgaagttcttgctcttatgggagagaatggtgccggaaaatcaactctgatgaaagttctcacaggtatttatacaaaagattcaggaacaattacatatgaaggtaaagaagttgagttccacagtgctcgtgaggcacaggacaatggtgttatcatcgtacaccaggagctgaacatgcttggtcatctgacagttgctcagaacatcttcatcggaagagagttcaagaagggcatcaagatcgatgacaagaagatgaacgaagaagcacagaaactgttcgacagaatgaacgttgatattgatccgagagagacaatgtcaaaacttacagtaggtaagcagcagatgtgtgagatcgcaaaagctatttcacatgatgcaaagattatcatctttgacgagccatcagcagctctgacagagacagagatcgagcagttgttcaagatcatccgtgacctgagaagtcagggaatgggaattgtttatatctcccaccgtatggatgagattaaagtgatcacagaccgtgttacagtcatgagagatggtacttatgttggaacattgatcacaaaagaaagtacaaaagacgacatcatcaacatgatggttggtcgtgttatttacgaagatccgaaggagaaaaacatgacacctccgggagcaccggtagttcttaaagttgaacacctgaacgctggtaagatggtacaggatgtaagcttcgaacttcacaaaggtgagatccttggattctccggactgatgggagctggacgtacagagacagccagagcactctttggagctgacccgatcgacagcggtgatatttatatcaacggtaagaaggttacaatcaagagcccacaggatgctgttaagtgcggtatcggttatctgtcagaggacagaaagagatatggtattgttgtacagaaatcagttgctgagaatacaacaatggcaacacttgaaaaattcatgagcggtccttttatcaataagaagaaagagaacaagattgctcaggaatatgttgagcagcttgcaacaaagactcctggtacagatcagctggtagttaatctgtcaggtggtaaccagcagaaagtcgttattgcaaaatggctgacaagagactgtgacatccttatcttcgatgagcctacaagaggtatcgacgttggagctaagaatgagatttacaagctgatgaatcagctggcagcagaaggaaaagccattattatgatttcctccgagatgacagagatccttcgtatgagtgacagaatcgttgttatgtgcgaaggtaagaagacaggtgagctggatatttccgaagctacacaggaaaatatcatgaacatggctacacgtgagattgagtagggagggaaaaagtaatggcaaataatacaacaaagaaggccggctctaataagtcatttattgacagaatgggaggacagaaattcatcgtcctgctcgttgttattgcactgtttatcttcttctgtgcaatgagcccgaacttcagaaaatatacaacatttattaacattctggacttctcctattatattgtcctgatggcaattggagtagcctttccactgatgacaggtggtgttgacctgtcaatcggtactggacttgtatgttattcactcgttggtggatatctgatcgttcacaaaggaatgcctacaatcgttggtatccttgcagcaattattcttggaatgctgattggtgttctgaatggtgtactggtagcaatcatggacctgccggcattcctggcaacactttgtacttgtatgatcactcgtggacttggttccattatcgtaggtggattcggaatctcatggccggcagcagcagcaccgggaggatggttcagaagtatcttcaagattcagtctggcggacagaatatcccgatcggtttcttatgggtaattcttctggttgttgttatgacattcgtactgaatcatacaagaattggacgttatacacttgcaatcggaagtaacaaagaagcaacaagactttccggagttaatgtaagattctatcatattgcagcatatgtaatctgtggattcttcgcaggacttgcttctatcgcatactccgctatcttcgctacagttcagccaggaagtggtgctggattcgagcttgaggctatcggtggagcaatcatcggtggtgtatccatgacaggtggtgtaggaagcatcacaggaacactgtttggtgtattcgttatctgtcttctgaagactggtcttccattcatcggactgacagctaactggcagcagatcattacaggatttgtcctgatcgcagccgtacttgttgatattcttaagagaaaagcaggaaaagagtaattttttccacttaaatttagaatttgtgaaaaatcacgaaaaagcaataattaattgcaaaaccattggtaatgtgctatattattaatgtgtgcggatagatagcagcgggaaaatatgctaaaaaagcgtgaaaaagaaagctgttactatagaagctaaacgaaacagactgtataaagagttttcggacaaaaaagtttgggcaaactacttctgcagagcgatttaagaaatgcacgaaagaggctctgccagagaggcccggcattagggagaggaaaactggaagaaaactcagacaagcagtcacaaatttattttgtcaggaggacataattatgaaaaagaaagttttagcagttttacttggtggatgtatggtagttggaatgctcgcaggatgtggatccaatggaggtgacactaagacaacagatggcgacactaagacagaaggatcaggagattccaagggatatcatttcgaagttgttgtaaagagcttccagtcttcatactggcaggcagctgtacagggaatcaaccaggcttgtgatgagctcggtgttacagctaacacaacaggaccgaacgctgagtccgatatcgctgaccaggttaacatgctgaacaacgcaatcaacaaagatccagatggaatcgctcttgcagcttgtgaccagaactcagttcttggtccactgaagacagcacttgaaaagaagatcccagtagtatgcttcgactcaggtgttccggacgctccagaaggatctgtatacgcaacagttgtaacagacaacgagcaggctggtggaattgctgctgagcatatctatccagcaatcaaagacaaacttggaaaaggacaggttcgtgtaggtgaagttaaccaggatgcaacatccgctaacatttctgagcgtggtatgggattcatcaacaagttcatcgaacttgctaaagctgatggatttacagtagcagttgtaggaaatgacttctatgtaaaccaggttaaagacaacggagatcaggcatctgcagacgttatccttgaagttgcagttccggctcagacaacagttgagctgtgtgctacagaggcttctaacatcatgaacaaagacgatacaatcgctatgttcggatcaaaccaggtatctgctgagggtgttctcacagctaaccagaacctgaacaaacttggaacagatgatgataagatcgttgcagctggattcgatgctggatcagttatcaaagccgctgttaaagatggtacattacttggtgctgttacacagtctcctctgatgcagggtaaaatctccatcgagactcttgctaagatctgtgatggtgagtctgtagaagacgttacaacagatggttactggtatgattctacaaacatggatgatgaggatatctctccaaacctgtatgactaattcatatctgtaaagagaagctgaattattaaagtgaaaagaaaggaatcgggaaattcccggttccttttttaaaataatatgttattatatcaaggaggaagataatatgttaaaaggaattccaaaaattttatcaccagaactgttgaaagtacttgctgagatgggacacagtgacagactggttatctctgatggaaacttcccggctgaatcaatgggaaaagacgcgattgtgatccgttgcgacggacacggagtaccggagattcttgatgcgattcttcaggtgttccctctggacagctatgtggagcatccggtaaatcttatggaagttatgcctggagatactgtggagacaccaatctgggatacatataaagagattatccgtaaatatgatgacagaggtgatgctgttgttggaaacattgagcgttttgcattctatgatgaagctaagacagcttatgcaatcattgcaacaggtgaatcagcactttatgcgaatgtaatgcttcagaagggtgttgtaacagactagtcacattttttaacgtaatggaggaacaatatgcttgatcatgtagaaaaaatatttgcagatatgaagccgatgatgaaaaagttgaagaaggcttcttataaagtaaatatggaggcttttatagagaatcacggacattatttccgtgagatgacagaatatacggagaatgcttctgataaagagacggcagccaaagagcttgcagtagactttacagataaggtttatgatgcatatgtttctccgaaaaaaggaaaaatagacagtgcaattcagacagatctgaatttctttatgatctattatgtatttccggcaattcttttgacagagcatgacgatgcgaaactgatcgcagatcatctctgcagcagatggggagaaaagtttaagaacagtaagattcagtatacagattatgattccctatatgtttcattccgtgagaagatatttggaatcttttaatacttgcaaatcaaccttacttgtgatagaataattaagattcatgtaatggcatgagaagattttagaagctatatttttatggtttaataagtgtgctgttacgttagtgtgtaggaggtcatggaagatggacattttgaagattgttttatacattatctttgttatagactgtatcgcattatcagcgattattcttttgcaggaaggaaagtcagccggattgggaacaattggcggtatggcggatacttattggggacagaacaagggacgttctatggaaggtgcacttgtaaagtctacaaagtttcttgctatccttttcctggtgcttgcagtagtactgaaccttaaggtttttaattaataacagatgatgaagtaagtataagacattctataataagactatagaatgtctttttttactttaagtagtgatgaaaggttactgttcactcccgtgtcaatcactccgctgattgacacggaggatgcatgttttgacttgaatgcatctcgccccatcgccaaaggcgatttaaaatggcgagatgcgttgctggtcgcacatcgtgtgaacagtaacgatgaaaggaaacggaatggatcagacatttgaaaagagaaaaaaagtgatttatgactttatttgtgatgatttttatatcccaatgaaagtcaaagagattgcgacggttcttcaggtatcgaaagaacagagaagagagcttcaggaagtgttggatgcactcgttgaagaaggaaagattacactttctaaaagagggaaatacagtaaagggcagacgaagcgtatcacaggaaccttccaggcgaatatccgtggatttggatttgttatggtagagggtgaagatgaggatatctttattccgggagagaatgtgaacggtgcattccagggagatgaagtggaatgtattatcacaggtgcgccgggaggtaagagaaaagaaggaaaaatcgtaagaatcgtgtcgcatcaggtgaagaagattgtcggattgtatgagaagagtaagagttttggatttgtacgtccggataatcagagatatctgaaagatatttatattccggctggaaaagagatgggtgccatggacggtcataaggttgtggtagaactgacatcttatggacaggaacatgctaagccggaaggaaagattgttgagatcatcggtcatgtgaatgatccgggagcagatattttatctattgtaaaggattatgatcttcctacagaatttccggagaaggtattgaatcaggcggttcgtgttggaaaagatgtatcagaagcagattgtgcaggtagattggatttacgtgactggcagatggttacgatcgacggtgaagatgcgaaggatctggatgatgcggtttctctgacaatgaaggatgagaattatcagctgggagttcatattgcggatgttaccaattatgtacaggagaaaagtgctctggatcgagaagcactgaagcgtgggacgagtgtttatcttgctgaccgtgtcataccgatgctgccgcatgtgttgtcgaatggcatctgttctctgaatgcaggggaagaccgtctggcattatcctgtattatgacagtgtctccaaagggcgaggtgatcgatcatcagatcgcggagactgtgatccgggtagacaagcgtatgagttatacaggtgtatctaaggtgctggcagaagaaccggaagcactggaagaagataaggattttgttccgatgattcagaagatgcaggaactttcaacgattctcagagaacgtcgtggcaagagaggttcgattgattttgattttccagagacaaagattgaattggatgagaaggggaaaccaattaatatcaaaccttatgagagaaacagtgcaacgaagatcatcgaagattttatgcttcttgctaatgagacagtggcagaagaatatttttggagagaggttccatttctctacagaacgcatgaagttccagatgaagagaagataaagaaactgagtacctttatcaataatttcggttatcatattcatgtgcatgatgaagtaaagccaaaggagattcagaaactccttagtcaggtggaaggaaccccggaagaagctctgatcagcagacttacattacgttccatgtgccaggcaaaatatacaacagagaatacaggacattttggactggcagcgaagtattatacacatttcacttctccgatccgccgttatccggatcttcagattcacagaattatcaaggagaatctgcgcggacgactgaatgagaatcgtatagaacattatgacaagatcctcccggaagtagcgaagcagtgtagtgacagagaacgactggcagaagagacagaacgtgaagttgtgaagatgaaaaaagcagagtatatgcgcatgcatattggagaagagtacgaaggtgtcatttccggtgttacaaaatggggaatctatgtagaacttccgaatacagtggaaggtcttgttcatgttgtggacctgcgggacgatcattataattttatagagcagacatatgaaatggtcggagagcatacaggaaagacatataaacttggtgaaaaggtgcgtgtccgcgtaagtgatgcagataagctgctccgaacgattaatttcgagctggcataatacttgcaggagtgcggttaaaatagatgagttagaggttggaatcagatggcaaagacagagaaaaaacttattgcgaataataaaaaagcatatcatgattattttattcttgagaaatacgaagcaggacttgtgctgcatggcacagaagtaaagtctcttcgtatgggaaagtgtagtattaaagaagcatttatccgtgtggaagacggggagatgtatatctatggtatgcatatcagtccttatgagaaggggaatatctttaacaaagatccgcttcgtgtgagaaagctgcttcttcataagaaggagatactgaaaatatttggtaagatgaaagaacagggaattacagttgttccgctgcaggtttatttcagtggaagccttgtaaagattgagatcggacttgccaaaggtaagaaattatatgacaagcgtgagacgatcgcaaagaaagatcagaagcgtgaagcacagagagaattcaaagcgttcaatcgataagggattgaagcaggagcgaatagaaaaaagcaattggatcagaaaccaattgctttttttacttcattgatatcgccagtaaatacaagtccacccattccggcttcttttgctgcattgatgtttggctcaagatcatcaataaagaaacattcttctgcctttaaatcaaatttcctgagaaaatgactgtagatttcaggagacggctttgcaagtctgatcggtccggaaaataagattccgtcaaagtgagaaagaagttcacttccttcatagtattctgcaaaataggttggagcattagacagcagatagattggtatattgcgctcttttaattcatggataaatgtaatggtatccggaagtaaagtagtgcagcgtggccattctgttgcaaaccggcggatgcagtccttcaaatgttccggaacctgatcgatgacttcatttatgtaactatcataatcaagtgtgccggcgtcaagttctgcccagcgtttataaacgatttcggataaataatccagttcttcttcatatggacagaattctgagaggatcgcttttccatcaaaacgtccaatgacatttccaaagtcaaaaacaatattcttgtatttcatgacaaattccctttctatagatgtttatttgtaactgttcagagccaagcaaaatttcataaaacaggtgtaaaatgcttgcatttttaagactgtttttgaaattttatttggcggatacgccacaccgacgaaatgcatagcattttggaggttggttctgaacagttacgtttattttattatactgcgcagaaaagacagattcaaataaaatatgcattgctggtcgcacatcgtgtgaacagtaacatcgtgcgaacagtaactaatagacaaaaagagaaaatctgtctaaaaattatcttgacatctattttatttgtgatatactttgagagtcaaagtatttaaagatcaaaacaattatggttcagatctggaaagaatcatactgtgaagagtgacaattattttgacagagttggagaagagatatgataggaagaatatgcgggacaggatcgtacataccgtcccatcgaatggacaacgtggaattgtcctctctggtcgacacaagtgatgaatggatccgggaacgcacaggaattcaaagccgacatctcgcaaaacaggagacggtatcttttatggctgcaaaagcagcagaagaagctcttgcagacagcgggctgaaagcagaagagattgacctgatccttgtagcgacgtcttcttcagaaacagtatttccgaatacttcctgtgaagtgcagaaagcaatcggtgcagttcatgcatggggatacgatctgaatgcagcctgttcgggatttattctcgcattgaatacggcgcagtcttatatccgttcgggtcttgttaagactgcactggtgatcggtgcagagaagatgagcagaattgtagactggaaagaccgtggaacttgcattttattcggagacggtgcaggtgcagtggttctccggggagaagaaagtgaaagcgcagaagcggtctacacggccatggcacattcggcaggagacaagggagaggcattgaccttacaatatggaacagaagaaatgccggtaatcaggatggatggacaggcagtttttaagttcgctgtgagaaaagtaccggaaatcatcgaagaaatgttgaaaaaagcagatgtttcaagagaagatgtggattactttgttttgcatcaggcaaacagaagaatcattgaagcggctgcaaagagggttggcgtagaaattgagaagttcccaatgaatcttggtgaatatgcgaatacgtcggcggcgtcagttccaatccttttaaatgaaatgaatcgggatggaaagctgaaaagaggtcagaaaattatacttgccggattcggggcaggacttacatgggcaggatgcctgatggaatggtaaattcaagaaaggaaaacaaaatcatgttagaaaaagtaaaagaaatcgtagcagagtcattaaacgtagaggaaagcacattaagtgagacaacatctttcaaagaggatcttggagcagattccctggatctttttgagatggtaatggcatttgaggaagcttttgaagtagagatcccatctgaagatctggagcagatcacaacagtgggtgacgttgtaaaatatatcgaatcacacaagtagaagtatagaactagtagaaaacgaagcatttcggttccttttcggcagccgatccgagagaaccgttgatagagaagtgatcaagaagggagttcttatgagaacgagaataacagaattacttggaattgagtacccgatcattcagggcggtatggcatgggttgcagaatatcatctggcgggatggaaagctgaaaagaggtcagaaaattatacttgccggattcggggcaggacttacatgggcaggatgcctgatggaatggtaaattcaagaaaggaaaacaaaatcatgttagaaaaagtaaaagaaatcgtagcagagtcattaaacgtagaggaaagcacattaagtgagacaacatctttcaaagaggatcttggagcagattccctggatctttttgagatggtaatggcatttgaggaagcttttgaagtagagatcccatctgaagatctggagcagatcacaacagtgggtgacgttgtaaaatatatcgaatcacacaagtagaagtatagaactagtagaaaacgaagcatttcggttccttttcggcagccgatccgagagaaccgttgatagagaagtgatcaagaagggagttcttatgagaacgagaataacagaattacttggaattgagtacccgatcattcagggcggtatggcatgggttgcagaatatcatctggcggcagcagtttcaaatgccggtggacttggactgatcggaacagcaagtgcaccggccgagtgggtcagagaacagatccgtgaggcaaagaagctgacagataagccgtttggaatcaatattatgatgatcagtccttatgcagatgaagttgcaaaggtggctgtcgaagaaggtgtcgcagttgtcacgaccggtgcaggatctccggaaaaatatgtaaagatgtggaaggaagccggaatcaaagtgatccctgtagttgcttctgtagcgatggcgaagagaatgcagcgttgtggagcagatgctctggtggcagaaggaacagaagcaggcggacacatcggtgagaatacaacgatggttctcgttccgcaggttgtagatgcagttgaaatcccggtgatcgcagccggaggaattgcagatggaagaggaattgcagcggcatttatgctcggagcagagggtgtccagatcggaacacgttttgttgtgacagaagaagcacaggtgcatgagaattataaagaatgcattttgaaagcaagggatattgattctcgtgtgacaggaagatctacaggtcatccggttcgtgctcttcgtaataaaatgacgaaagagtatcttgagaaagaacaggcaggagcaacattcgaagaacttgaacatctgacactaggaggactcaggagagctgttgttgatggagatgttcagagcggaagcgtgatggcagggcagatcgcaggtatgatcaaggagaagcttacctgtcaggaagtgatccagaagctggtctcacagacagatgaactgatcggaggaaaaggattctatgagtaagatcgcatttattttcccgggacagggagcacagaaagccggaatgggaaaagatttctatgaaaacagtaagacggcagcagaggtgatcgaccgtgcaagtgaactgcttggactggatatgaaagcactctgctttgaagaaaatgatcttctggatcagacagaatatacacaggcagcacttgtgactgtctgtatggcaatggagaaggtattaagagaacggggactcgccccggatgtcacagcaggcttaagcctgggtgaatattgtgcgattgcttcagcaggaggaatgagcacagaaaatgcaatcacaacagtaagaaaacgcggtattctgatgcagaatgcagtaccgggtggtcagggagccatggcagcggttcttggactggatgccggaaagattgaggaagtgctggcagatcgaagtggtgtaatgatcgccaactacaattgtccgggacagattgtgattacaggatggaaggaagatgtggaacaggcagcagatgcactgaaggaagccggagcaaagagagtccttccgcttaatgtcagtggaccgttccattcttcccttctggagcaggccggagaagaacttggaaaagaactggaacaggtagatttttctgatctccagattccatatgtgacgaatgtgacagcagaatatgtaactgatattacaaagacaaaagaactgctcgcacgtcaggtagcatcttccgtacgctggcagcagagtatggaacttctgatctcggacggtgtagatacatttgtcgagatcgggcctggaagaacactggctggtttcttgagaaagataaaccgtgaggtgaaagtgtataacgtcggaacctgggaagacgtagataaggtggtaaatgaattatgttagacagactgacagggaaagttgcggtagtgacaggtgcttccagaggaatcggaagagcgatcgcgctgcgtctggcacaggagggcgcagcagtagtgatcaattataatggatcgaaagagcgcgcgcaggaagtgaaaacagagattgaatctgcaggcggaacagcacagatcatgcagtgtgatgtggcagatgcagcatcttgtgatgagatgtttcagacaatcattaaagaattcggaagaatagatatccttgtgaacaatgcgggaattacaagagacggactgcttatgaaaatgacagaagaggattttgatgctgtgatcgatacgaatctgaaaggaacttttcattgtatccgtgcagtctcaagacagatgctacgtcagagatccggaagaattattaacctgtcttctgtatcaggagttcttggaaatgcaggacaggctaattattctgcatcaaaggctggtgtgatcggactcacaaagagtgcggcaagagaactggcttccagaggaattaccgtaaatgcgatcgctccgggatttattaacacagagatgacagaagtactttcagagaaggtgaaagaaggagcaacagcccagatccctcttggaaagtttggagagacagaagatattgcgaatgcggcggcatttcttgcttctgatgaagcacgttatatcacaggccagacgctgcatatcgatggcggaatggcgatgtaagaatagaaggagtaggaaaatgaagagacgagttgttgtaaccggaatgggtgcggtgacaccgattggaaatacagtagaagaattctggaacggaatcaaaacaggtaaagttggaattggtccgatcacaaaattcgatacaacagattataaggttaagctggcagcagaagtgaaagatttcgttggaaaagaacgaatggatttcaaggcagcaaagagaatggaattgttctcccagtatgcggttgcagcagcaaaggaagcatttgcggatgcgggacttgatatggagcaggaagatccttatcgtgtgggaacaatcatcggttcaggtatcggaagtctcagctgtgtagagcagaattacgacaagatccagacaaaaggaccagcgcgtgtaaatccattgatggttcctttgatgatctccaatatggcagcaggaaatgtatccatccagcttggactgaaaggaaaatgtacagatgtcgtgacagcatgtgcatcaggatctaacagtattggagatgcactccgtgcgattcagtatggtgacttggatgtttgtgttgcagggggtacagagagctgtatctgtccgaccggaattgcaggatttactgcgttgacagcactgtctacaaatgaagatccaatgacagcttcccgtccgtttgatcaggacagggatggatttgtcctcggagaaggagccggaatcgtagttctggaagaacttgaacacgcgaaagcgagagacgcgaagatttacgcagaactcgctgggtacggctctacaggagatgcttatcatattacatctccggcagaaaatggagaaggagccggaatggcgatgaaacttgcaatgaaagaggctggtgtggcaccggaagaagtggattatatcaatgcccatggaacaagtacacatcacaatgacctttttgagacgcgtgcaatctgttatgcattaggagatgcagccgaaaatgtagttgtcaattcaacaaaatctatgatcggtcatcttcttggagcagcaggagcagtagaatttgttgtctgcgtaaagagtattctggataatttcatccatcagacagttggtacaaagaatgtagatccggaatgtggattgaattatgcagtaggcgcaccggtagagaaagaagtgaattgtgtaatttctaattctcttgggtttggtgggcacaatgtgtctcttcttgtaaaacgtttcgaagaataaggagaagcgaagatgaagatggaagaaatattgaagctgatcgaagcagtctctgcttctgagcttacagattttaaatatgaagaaaatggaacaaagctgaatctgaagaaagaacagcagaaggtggagattatacagagtccgggagtagttccggtgacaggaactgtcacagcaggtcttcagacagcagaaattctgcaaaatccaggaaatgaagcggatcacacacaggaagagcatcaggaagtgataaaagaaacagaaggtgaactgatcgtttcacctctggttggaactttctacgcagcaccggcagaggatgcaccgagttttgttaaggttggtgacaaggtcgaagccggacaggttgtcggaatcatagaagcgatgaaacttatgaatgagattgaaagtgaatgtgccggtacagttgcagaagttcttgtagagaacggagaaccggtagaatacggccagccgatttttagaattgtttaagaaaggaattcagatatgaatagtttaaatgtagaacagattcaggaaatcattccgcacagacatccatttcttttgattgataagattgaagattatgttccgggagaatatgcaattggatacaaaggtgtttcttatcatgaggatttctttcgtggacatttcccacagaaagcagtaatgccgggagttctgattcttgaggcacttgctcagacaggagctgtggcaatcttaagtgtaccggagaatcagggaaagattgcattcttcggtggtgtacaaaaatgtcgcttcaaaggaatggtatttccgggagatcagttgaaattagagacgaagattattaaaagaaaaggaccggtaggcgtaggagaagctgtggcaacagttaacggaaaggtcgttgttacggcagaacttacatttatggttggagaataaaaaatcaggagcagaagaaatgatagagaagattttaattgcgaacagaggggagattgcagtccgggtgatccgcgcctgcagagaaatgggaatccgtacggttgctgtttactctgaggcagataaagatgcgctgcatacccagctcgcagatgaagcagtctgtataggtcctgctccatccgcagaaagttatctgaatatgcagaatatcatcagtgcaacacttgtgtccggcgcagatgcaatccatccgggattcggattcctttctgaaaacagcaaatttgcagaactgtgtgaacagtgcaagatcacatatatcggaccggattcaaaggtgatcagtgctcttggaaataaatccgttgcaagaaatacgatggtggaagcaggtgttccggttattccgggaagcaaggagcctgtctataccgtagaagaaggcgagaagatcgctggtgagattggttatccaattatcgttaaggcagcacttggcggtggaggaaaaggaatgcgtgtcgcacagacaccggacgagttccaggcaagtttccagacagcacagaaagaagcgcagatggcattcggagacggaacaatgtatctggaacattttgtggaacatccgcgtcatatagaatttcagattcttgcagataagtatggaaatgtggtccatcttggagaaagagactgttccattcagagaaatcatcagaagatgatcgaggaatctccgtcagaagcactgacaccggaattgagacagaagatgggagaagcggctgtgaaagcggcgaaggcagctcattatacgaatgccggaacgattgaatttctcttagaaaagagtggagccttttactttatggaaatgaatacaagaatccaggtagaacatccggtaacagagtgggtgacaggaatcgatctgatcaaagagcagattaagattgcagacggacagagactaaaacttcagcagaaagatatcaagatcacaggtcacgcaatcgaatgcaggatcaatgcagagaacccggaaaagaatttccgcccgtctcctggaaaaatcacagatgtacatttcccggggggtgaaggcgtacgtgtagacagtgcgatttacacaggatatgaagttccgccttattatgattccatgcttgcgaaactgatcgtacatgctgacgacagagaagaggctatccgtaaaatgagaagcgcacttggcgaagttattattgaaggtgtggatacaaatattgattatcagtatgagattttgaatcataaaaaattcatatctggagatattgatgtggagtttatcggaggaatgatgaatgagactgcataatatgtttaaaaagaccggagagaagatcacttcgattcattcacgaaacagaagaaagccggaagcaccggaaggaatcttgaaaaaatgtaataaatgcggtgcggcaatcttgacagatgaagtaatcaacggaaaatatatatgtcctaaatgtcatggatactttcgtattccggcatataagagaattgagcttgtgacagacgcaggctcttttgaagaatgggatgcaaagatcgatgaaggggaaagaccggagaatccgttggatttccgggggtatacagaaaaagtcgaagctttaagagtaaagacaggacttgatgaagcggttgttacaggaaaagcaacaatctgtggatatccggttgtgatcggggtctgtgacggaagatttatgatggccagtatgggacatgcggtaggagaaaagattacccgtgcagtcgagcgtgcaacagaggagaggcttcctgttgttctttttacctgttccggaggcgcacgtatgcaggagggaatcatttccctgatgcagatggcaaagacttcagcggcactgaaacgccacagtgatgcaggccttctttatattccggtattgactgatccaactacgggaggtgtcacagcaagttttgctatgcttggagatatcattcttgcagaaccgggagctttgatcggattcgccggtccgcgtgtgatcgagcagacgatcggacagaaattgccggaaggattccagagagctgaattccttcttgagcatggatttgttgatcggatcgtaaccagggatgagatgaaggaagtactggggcagattctgaaaatgcatacggttacagatgaaaagaaagaagaatgtccggaagagaaaaaagagaacagaaaaaacatatctgcggtaaaagaaaatgtgtcagcctgggagcgtgttctgaaatccagggaaaaagaacgcccggtcggtaaggattatattgacagattgtttacagattttgtagaattacatggagacagatattataaggatgatccggcagtagtaggaggaattgcgtattttcatggaaaagcagttactgtgatcgcccagtgcaaaggaaagacaacgaaagagaatctggaacggaattttgcaatgccgtctccggaaggttacagaaaagcactgcgtctgatgaaacaggcagagaagttccagcgtccggtcatctgttttgtagatactccgggggctttctgcggaatggaggcagaagagcgtggacagggtgaggcaattgcccggaatctgtatgagatgtcagctttgaaagtgccggttctttcaattgtaatcggagaaggtggaagcggcggtgcgcttgcacttgcagttgcagatgaagtgtggatgatggagaatgcagtgtattcagtactttcaccggaagggtttgcaagcattttgtggaaagacagcaagagagcgtcagaggcggcaggagtgatgcgtctgacagcagcagatcttaaggaacttaaggtgatcgaagaaataatttgcgagcctgaagtgtaccgggaagatacgatggttcctgtgctctgtgaactggaagagaagatggaacatttccttgaacaatatggaagcctttcagaaaaacaactgacagatagaagatacgacagatttcgtcgaatgtaagagatagaaaacatggcattgtctgaattaagatagcagaccagaatgaaagtgatcccggaagattgaatagagaagagctgtttgaagagatcagagaacagtagaagacgaggaggaaaaaagatggatgcgtataataccatcaatgacattctggtacatttatttaatgaaatctgggagctggagaaaaaggcaatcattacagaggagtttaaagacatcacaaacaacgatatgcatataatagaagcaatcggtgtttcaggaaagacaacgatgtctgtagtggcaaagaagatgaagattacggcagggtctctgaccacagcggtgaatgggctggtaaacaagaagtatgtaatgcgtgcccgcggtgaagaggatcgaagagtggtgtatatctggctgacagaaaaaggggagaaggcttactatcatcacgaggagtttcacagggagatgacaaatgctgtgctgaacagactggatgaaaaagagattccggttcttatgaagacattggacggactttcagaatttttcaggggatattcttcagaggaataaaatgataattatcaaggaaaatttgacgttttgtcaaaaatgagttacaataatctgtatcgtgaataatttatcattacggacaaaagttcttgttattatttcgcgttaagaataacattgtaatgaggtagtgccaatatacttgggtgtatattttaggagggaaacaagtatggtaacaaagaagacatcttcaacaacaaaagctgaaacagcaacagtaaaggcagagaagaaagagacagcagctgcgaaagcaatcgagacaaagaaagacacaacaaagaaacttgaaacaaaggcagcagtgctggtagatacaccagaagttcaggcagaagaagtaaaagagacagtgaagaaggcagctaagaaggttgcagcaaaagcagaagatacagctgaaaaggctgtgaagactgtaaagaaagcagcggctaagaagacagcaaccaagactacaaagaaagctgagctgaagacagaattcttccttcagttctctggtaaagagtatacagagaaagagatccttaagaaagtcaaagatgtatggacaaaggatctgaagaataaagtcggagacatgaaagatgttaagatttatctgaaaccggaagagtcagcagcatattatgttgttaatggagatacaacaggaaaaatcgatctgtaagatataaataaaagatataagatcgctttccggacgtaccgggaacaggtttacttaagaaaagacagggagtcagacacagctgaatgcaggtgaaggacggacctgtctttttaatatattaggaaagtgctttcctaatatattaaaaacgctccgcttaggtaaacatttcgccggtgcagaaggcagtgtgccttaaggtgacaggaatctggcaagtgtggtttgagaaaggagtatgcaagatgtacgagaaagagattgagcagctgcaggcaatgattgatgagagtaaccggatcgtgtttttcggaggagccggtgtatcaacagaaagtaatattccggattttcgaagtgcaacaggaatttatcatcagaaatataagtattcaccggaacaggtggtcagtcatagcttttttatgaaatatccggaagcattctatgagttttataaagagaagatgatgattttgggtgcgaagccaaatgctgcccatctgaaactggcagaattggagcaggccggaaaattgcaggctgttgtgacacagaatattgatggactgcatcaggcggcaggaagcagaaaagtctatgaacttcatggaagcatccacagaaattactgtatgaaatgtgggaagttctatgatgcggaatatgtgaagaattcagaaggaattccgagatgcagctgcggcgggatgattaagccggacgtagtactttatgaagagggacttgaccagaagacgatccaaggggcagtcgaagcaatttcatcagccgacatgctgatcatcggaggtacttcccttgttgtttatccggcagccggttttattgattattttcacggaaaacaccttgttgtgattaataaatcagaaacagccagaactgtccgggcagagcttgtaatatcggcttcgatcggagaggttcttggtgcgattcatgtaagtggcgaataaaatttcttttcctgtaaatacttctgaaaaggaggatgctgtatgcagcaataagaagtatgggaagaaaaaaggaaaagacaatcaatcttacagaacttgaaccggaagaaaaactgaagtatgagatagcagaagaattaggccttttagatcgcgtgatgcaggatgggtggaagtcattaacatcaaaagagacaggacgaattggcggaatggtcaccggaagaagacgagagataaaaaaacagacaaaaattgcggataaaaatgatgaaagataaacaaaagtaaaattttgaatgacacagcttttgacaaatcaggataaatttggtaaaatagacagaatggggagatattattttgcgttagaattcgcagagcttttggaaagtgataactttggtggcataaatgacagaaaaaatttcaatatttgatgtggagatttcctgcatcaaggcaaaagaagcaatgatgcaggcaatcggattcatgaaaggcgattccgtcaataccattgaacttgtatcgatggaatctctgatgaaagaacatgaaaatccggagtggaaaaaaaaggtttcaatgcaggatcttgtccttccgggaagtgtagagattcttgaggcagcgaaaacggatgatgcaagattgctgcgtgagacggataataaattattcttaagaatgtttttgaaatatttacagaagaaccatcataagatctatcttctggcagccagtcaggaggaactggtaaaagcagaggaagctcttgcaaggtataatcagggaatccgtgtggtaggagatgccgtgatccatctggaagacggagagttgacagatgcagacaggatccatggaatagtgaatgcagtcaatggctcagaggcagattgtattttatcagtccttccatcgccggcgcaggaagattttattgaacagaaccgggcattgatcgacacaagagtctggattggctgtggatcagttctgatgcgcagctttgacgacagaaagatgacaagccggataaagagaatgttagtaaagaaagtatttcgctataaagtagagaagcagaattagtctttgtgaagaatgctaaaagataaaaatgtgaatatttcatagattcgactaagaaatgcataaaaaagatggatttcctctttctttttttgctgttttgccttaatataatataagggtatgtgtacggataaataatgcatacaaaaaaattgtggaatatgcacatgcgtgttactacttacagtttgctgtaatcagcaatacatcgtacagagtggaggaaaaaaggatgatttcgaatcagatacttcaaaacactattgaaggattaaagggaatatcaagggttgatttctgtgtactcgacacagaaggcaaggaacttgcagcaacatttgatatggcaaaagattgtggggaagcggttctttcttttgttgaatccccggcagacagccaggtgatccagggatgccagttctttaagatctttgacgaacagcgtttggaatatgttttgcttgcagatggcgagacagaagatgtgtatatgctcggtaagattgcggcatttcagatccagagtctgcttgtagcctataaggagcgttttgacaaagataactttatcaaaaatcttcttttagacaaccttcttttggtggatatttacaatcgtgcaaagaaattacatattgacacagaagtaaaacgtgttatctttattattgaaacatcgcacgagaaagacagtgctgcacttgataatgtgagaaatcttctgggaggaaagtcaagagactttatcacagctgttgatgagaagaatattattgttgtgaaagaactctcagataaggacggcaataaggaacttgagaagatggcgaaagagatgctggatacgctccaggcagagggaggcgacgagcagatccatattgcatatggaaccatcgtaagtgatatcaaggaagtatccaagtcatacaaagaggcgaagcttgcacttgatgtaggtaagattttctttgatgagaaggatatcgttgcttatacaacacttggaatcggtcgcctgatctatcagctgccgctgccactttgtaagatgtttatcaaagagattttcgaagcaaaatctccggatgactttgatgaagagacattgacaacgatcaataagttctttgagaacagccttaatgtatcagagacatccagacagctctatatccacagaaatacactggtatacagactggataagcttcagaagagtaccggtctggatctgcgtgtgtttgaggatgccattactttcaagattgccttaatggtagtaaagtatatgaagtatatggagacattagagtactagaaccgtaggagtatagataagttttaggaggaacatatgattgaattaaggaatgtgacgaaggagtattccaaaggtcacgcagccttgaatggagtttccgtgaagattgagcgcggagaatttgtattcatcgttggtgacagtggatcaggtaagtctacattgatcaaattgatcatgaaagagttgaatccgaccgagggtacaattatcgtcaacggccagaatttgaaccgtatgaaacacagaaacattgctaaatacagaagaggacttggagttgtgttccaggatttccgtcttctgaaggatcgtaatatttatgagaatattgcattcgctttgcgcgtgactgagacaccgacccgtgtgatcaagaagaaggtaccggcagctctgtcactggtaggacttgcacagaaatacaagtcattcccaaaggaactctcaggtggagagcagcagcgagtagcgattgcaagagcaattgtaaatgaacctgccattctgctggcggatgagccgacaggaaacctcgacccgacaaactcatgggagatcatgagtctgctgaaagaggcgaatgagcgtggaacaacagtacttgttgttacacataaccaggagatcgtaaacgagatgaacgagcgcgtcattactatgaagcagggcgtaatcgtcagtgatgagaaaaaaggtgggtatataaatgaggattagtacatttggatacgttggaaaacagggcgttaagaatatctggagaaacaagatgttttcactcgcatccatagcgacgatgtcagcatgtattttcctgtttggattgtttttctcgatacttgttaacttccagtatattatcaaaagtgcagaagaaggtgttgcgatcaccgtcttctttaatgatgacgcaacagaggaacagaagaaagagattggcgaacagcttgagtcccgtgatgatgtttcagaagtgaagtatgtgtcatcagatgatgcatgggcagaattccagaaagagtattttggagacaacccggaacttgcagaaggttttaaggatgataacccgctggcaggttcggataactatgaagtctacatgaagacggtaaaaggtgataataaggatctgatcgcgaagagtaagtctctttcagctacgcagcaggatctggttaaatttgcacagagtctggacggagtcagacaggtcaataagtcagatgttgtagcgaacacactttccagtgtgaatatgcttgttgcatatgtttcaattgcaattatcgcaattcttctcggagtatcgatcttcctgatcagtaatacggtaacaacaggtattacagtcagaaaagaagagattgcaatcatgaaatatatcggagcgaaggactttgtagtaagatcaccattcgtgatcgaaggtctgatcatcggattattcggtgcagttattccgcttgctctgttatatttcctttatgacaaggctgtagtatatattatggagaagtttagcattctgaagaatatcattacattccttccggttggaaatgtatatatctatttgttgccaatcgggcttgcaatgggaattggaattggattcctcggaagttacttcactgttcgtaagcacttaagagtgtaataggagatacctatgaaaagacggatgagaaaggtgacagcactggttctgtcagtcggaatgatgctgtcaatgacaattacttccggtgctgtgacaattgatgaagcgcagaaaaaagcagatgagctgcaatcacagaagagtgcagctcaggctgaaaaagatacacttgctgcgaaacttaattccatcattgaccagatgaacaagacgcaggaagaattaagtgccaaggaaactgaaatttcaacagctgaggaagagcttgtacaggcgaaggttgatgaggatgatcagtataacagcatgaagaagagaatcaaattcatgtatgagggtggtaatacccagttccttgagatactgatgtccagcagcaatattggtgatctgctcaataaagcggagtatgtatcaaagctttcttcctatgacagagatatgcttgttgcttttcaggaaacggtgaaagctgtagaagaaaaggaagcaaagcttaaagatgagtatgagaagctgaatacattacagacaagcttggtaagtcagcagacggaagcacagaatctgatcagcagtaaggaagcacagattgcggagattcagaatcagattacagataatgcgaacattcttgcggacctcaaggcgaaagcagaagcagcaaaacgtcttcaggaagagcaggcagcggcggctgctgcagctgctgcggcggcaaagaagaacaatagcggaagcagcagtagtaatggaagcagtagttccagaccggcttccagcggaaacgtggtgagcggaagtggatattttacacatccatgtccgggaatgacgtaccagtccagttattttggagaggttcgatctttcgattcaagaccacataaaggaaatgattatgccgcaccgacaggaacacctacatatgcagcagcagccggaacagtcattacggcaggctggagcaacagtgcaggaaactgggttgttataagccatggaaatggattggtgacaaagtatatgcatcacagctcaatttgtgtgagtgccggtcagagagtagcaaaaggacaacagattggatatgttggttctacaggatattcaaccggagcacatctacatttccaggtggagcttaacggaacaccagtgaatccaaataattatatgtaagacaaagggattcaaaatcttcctttcatgtttacatgaaagtgattcaaagaataaagggggacaaagtggaagattctgctttgtccttttctttaaataacagcgaaagggacagacaatggaacagaaaaagaaaaagggatatggagccgggattgttaccggaattcttgtaacagttcttgtcagcctgcttctccttgggggattcagggtcattacgaacacagccggcagttatgcatctggtaaagtgacagaaaaagaggtatcaaaaaaactgaataagctgaatgctttgattgataaatattatctgtatgaagatgaaattgatacagataagctggcagaaggaatttattccggatatacgagtgcactgggagataagtacactgtttattatgatgaagatgagacgaaagctctgatggaatcaacaagcggaacattttcaggtgtgggtgcaacgctgacaaaagatgcggatacgggctatgcgacaattgtaaatgtctatgaagactctccggcagagaaagcaggactgaaagcaggagatatcctggagaaaatcgatgaccacgaggttggtgatgagcagcttgatacggtggtgtcctggatcaaaggggaaaagggaacagatgtaaagattacagttctcagagacggagaagaactggaactgactgccacacgagatacgatcgaagtgaagacagtttcgtatgagatgaaggagaaccagattggctatatcagagtgtctgagtttgatacagtaacttatgaccagtttaaagaagcgttggacgatcttgaaaagcagggaatgcagggtcttattgttgacctgagaaacaacccgggcggaagtcttgatacagttacaaatatgctgcgtctgcttcttccggaaggtacaattgtatcgacaaaggacaagaatggaaagacagacgaaatcacttgtgacggaactcatgaatttaagaaaccaatggcagttcttgtaaaccagtacagtgccagcgcatctgaaatcttcagcggtgcagtacaggattatggaacagcgaagattgtcggagttacaacgtatggaaaaggtgttgtgcagcaattgatggatctgggagatggaacctgtctgaaagtgacgattgcagagtattatactccaaatggaagaagcatcaatgggaaaggtgttgagccggatgtcgaggtggagtatcagtatgacgaagagaatcccaaagcggataaccagctggatcaggcattaagcacagttcagggagaaattagtgaaagtacacaaaaccgataggttgaaaatatcttgttttgatgaaaagttaaaatgtgtgacaatttgaataaaacctcttgaaaatcaaaaaactctgtgctaatattggaaacaagttttagcagactaaagtgctgaaccagaaaaaggctaagaacaagactctgattcacagaaactgacaggaagttggcgtcaccgactgagagcgccggacagcggagcggattaagggaacacttgggagctggctgtctgaacagatgaagtagggcagcacgtggagcatacgttacatgcaaagagtggaatctggcttacacagggataagatttgaaatgtgaagactgagattcaatgcgggtggtaccgcggatattatgattgtaatttccgtcccgggatactgatgtatcccggggcttttttatttagaaagcttcttcccgggatgctggaatctgaaaggagaagaattatggaatttgtaacaggtgtaaaaaagaaggaaacattggaactgagtgaacttctcgaagagggaagaattggaaccgaagtgaaagtaaatggtgcgatccatacgatccgtgatatgggaacaattgcattcattattctcagaaaaagagaaggacttgttcagtgtgtatatgaagaagatatttccaaatttgacttgaaagatgtgaaggaagcagatacagtagaggtaacaggtgtgcttgtagagtctgcgaaagctccgaatgggattgagattcgccttggtgaattgaagatcttaagtgagccggcagagccaatgccgcttccgattgcaaagtggaagctgaacacatctctggaagcaaaattaaactacagaccgatttctctgagaaatatcagagagcgtgcgaagttcagaattcaggaaggaatcgtaagagggttccgtgatttcctttataaagaaggatttacagagatccatactccgaaaatcggtgccaagagtgcagagggcggtgcgaaccttttccgtctggagtatttccacagaccggcgatccttcagcagagtccacagttctataagcagatgatggtcggagtattcgacagagtctttgagacagcgccagtattccgtgcagagaaacacaacacaaagcgtcatctgaatgagtacacaagccttgatttcgagatgggatatattgatggatttgaagatatcatggcaatggaaacgggatttcttcagtatacgatggagctgttgaagaaagagtatgcaagagaacttcagattctgaatatcgaagtaccgaagacagataatattccggcagtaagattcgacgagatcaaacgactggtatccgagaagtatgacagaaagatcaagaacccatttgacctggaaccagaggaagagacattgatcagccgttatgcgaaggaagaatgggatgcagattttgtattcgttactcattatccatcaaagaaacgtccattctatgcaatggatgatccggaggatccgacttacacgctcagttttgacctgcttttcagaggaatggagatcacaaccggcggacagcgtattcatgattatcatgaacttcttgcgaaaatggagaagcgaggtatgacagatgaaggcatggagcagtatttaagtgcattcaagcatggaatgccaccacacggaggtcttggaataggtatggaacgtctgacaatgaagatgatgaacgaagacaatgtaagagaaacaacattattcccaagagacttaagtcgtctggaaccataagaagaaaatacaaaaacgggtcaatcctctggattgaacgaaaaaactgttggatgtgaaggtctgaactgagaaagagaactgcccacaggatgttgtggtcagaaacttaaggagtagaaacgagggaggatctttatgtttaagaaaaaagaatgttatctttgcggaggtaaattgattgatggccgttgcagttcctgcgggctggataacacaaagctggagaaaaagaattacaggctgaatgagagtagttttgaccgcaagaaaaaaatgacatattcccagaaacgacagaatgacactggagagacaaaaaaacgggagaaaaagaaggatgcgggacatctctgtgagagtcataacggacggaaaagaacgcagacagaatatcagcaaaaagaaaatccgaggattgaaatcccacagacagggcagatgcagccaggtgggccgacggtatttaatccggcaaggaaggctcatacaggatcttatgaggaacagaaaaaggcaaggaaaatcagtggaattcttgcgggaattatcgtggcaatcgtatcatttacaagcattgcaggttcagttggtgatttcatttcctcatttggggatgatttccattcctcagattatgactggaatgatgatggcagcgaagtggagtctgagtatgatccatatatgaatacaacgagagaactttctgaaacaggagcaacttatgactgtgtattaggatatggggagtatgaaatcggagcacagatcccggaagggacttatgaagtggagcttgtctcaggagaaggctccatgcagcaggatgatcctgagaattcgatttattactattcttattttagtgaagatgagtcagatacggatgcaggagattatctggacgatgtgagattgtatacaggaggtcatctgaagattgatacaggactggttgtccagtttcattctgagaatgcacagacggaacagatgcagctggaagaaaatccgctgacggagcaggtaacattgaaagccggaaacacttatacggcgggaacagatttcccggcaggatggtatgatgtgaccgaggcatcaggagtcgactgggcggagcttcattacaagatttatcttggtgatctttatgataaggaaaatgaaaatctcaattatgaaaactatggactctggttttatgatacagatgggtcagaatcttatagaaatgcagttttcccggaagggacggagctggaagtggatgatggggatttaatcctgacgccgtccggctcagtaaaaaaccagaactatgacagtttctatgatatgtaccgctacaggtcgcaataagatgagaaatttatgatactgattttggaaattgtcaggattagcaaagacagagtagaaagaaaggatgattaaattggcaaataaaatatccgatgaaacaatcgagtatgtaggaatccttgcaaagctggaactttcagaggaagagaaagaagcagcgaaaaaagacatggagcagatgctggattatatagatacattaaatgaacttgatacagcaggaatcgaaccgatgtctcacgtatttccggtacagaatgtgttccgtgaagatgtggtgacaaatggcgataacaaagaagcgacacttgcgaatgcaccacttcgtaaagaggacagttttgaagtgccgaagacaattggttaagggagtgagagcagatggatttattaaaacttacagcccttgaactgggcgagaagatcaatggatgatggggatttaatcctgacgccgtccggctcagtaaaaaaccagaactatgacagtttctatgatatgtaccgctacaggtcgcaataagatgagaaatttatgatactgattttggaaattgtcaggattagcaaagacagagtagaaagaaaggatgattaaattggcaaataaaatatccgatgaaacaatcgagtatgtaggaatccttgcaaagctggaactttcagaggaagagaaagaagcagcgaaaaaagacatggagcagatgctggattatatagatacattaaatgaacttgatacagcaggaatcgaaccgatgtctcacgtatttccggtacagaatgtgttccgtgaagatgtggtgacaaatggcgataacaaagaagcgacacttgcgaatgcaccacttcgtaaagaggacagttttgaagtgccgaagacaattggttaagggagtgagagcagatggatttattaaaacttacagcccttgaactgggcgagaagatcaaagcaaaagaagtaactgtacgagaagcagtcgatgcagtgattggacagatcaaagaagcggagtcagagattcacagctttgtgacgatagatgaagaaggtgcttatgcacaggcagaggaaattcagaagaaaatagatgtgggcgaactgacaggtccacttgcaggagttccggttgcggtaaaggataatatgtgtatcgagggacagcttaccacatgtagttcaaagattctttccaacttcaaaccgacctatacggcagaggcagttgagaacctcagaaaagcaggagcggttatcattggtaagacaaacatggatgaatttgccatgggaagtacaacagagacgtcgtattacggaccgacacgcaatccacacaacacagcgcatgttccgggaggttcttccggtggttcctgtgcggcagtggcagcgtccgaatgttattatgcacttggatctgataccggcggatccattcgtcagccgagttctttctgtggagttgtcggactaaaaccaacttatggaaccgtttcccgatatggacttatcgcatatggatcttctttagatcagattggaccggtagcgaaagatgtatcggattgtgcggcaattcttgaagcaattgcatcccatgatccgaaggacagcacttccatggatcgtgatgattgtgatttcacagaagcacttgtcgatgatgtgaaaggactccgtattggaatcccaagagactatatgggagaaggtctggatcctgaagtaaatgatgctgtgatgaaggcagcaaaagtactcgaagaaaagggtgcgattgttgaggcgtttgatctgcgacttgtaaaatatgcaatccctgcttattatacgatcgcagatgcagaggcaagttctaacctggaacgttttgatggtgtgaaatatggttatcgtacgaaagattacgatggacttcataacatgtacaagaaaacacgttcagaaggatttggtcctgaagtaaagagaagaatcatgcttggatcttttgtcttaagttcaggatattatgatgcctactatctgaaggcacttagaacaaaagctttaatcaagaaagagtttgaccgtgcattccgtaattatgacatcattctcggaccggcagcaccaacaactgctccggagcttggaaagagcttaagtgatccgatgaagatgtatttgggagacatttatacaatctcagtcaatcttgcaggtcttccgggaatgagcgttccggttggaaaagacagcaaaggacttccaatcggtatgcaactgatcggaaatgtatttgaagaaaaaactttgatccgtgcagcatatacctatgagtgtgcgacaaagaagatgcatgaaacaccggcatctgtcggtcttatgtcagaaaaggaggtgcgttaacaatggcaaagcagtatgaaacagtcattggactggaagtgcatattgagctggctacaaagacaaagatcttctgtggatgcagcacagaattcggtggcgcaccgaatacacatacttgtccggtatgtactggtatgccgggatcgcttccggtgttgaataaacaagttgtagaatatgctatggcaattggtcttgcaacaaactgtaagattacacaggtatgcaaatttgaccgtaaaaactatttctacccggataacccgcagaattatcagatttcccagctgtatctcccgattgccagagatggatatgtagagatcgagagtggttcaggaaagaagaaagtaagaatccacgagatgcatatggaagaagatgcaggtaagctggttcatgatgagtgggatgatacttcacttgtcgattataaccgaagcggtgtgccacttgtagagatcgtatctgaaccggatatgcgttccgcagaagaagttatttcctatcttgagaagcttcgtatgatcgtgcagtatttaggcgcatcagattgtaagcttcaggaaggttctatgcgtgctgatgtcaacctgtctgtccgtgaagtcggatccgatcagtttggtacaagaacagagatgaagaacctgaactcatttaaggcaatcgcacatgcaattgaaggcgaacgtcagagacagattgagttgatcgaagaaggaaaacaggttgtacaggagacaagacgctgggatgacaacaaagagcattcttatgcaatgcgttccaaagaggatgcacaggattatcgttatttcccggaaccagaccttgttccgatcgtgatcagtgatgaatggatcgagaaaatcaaatctcagcagccggaacttcgtacggagaagctggagcgttacaaggagcagtttgatattccgcagtatgacgcagagatcatcacaggttctaagaaaatggccgatctttttgaggcaacaacagcaatctgtgagaaaccgaagaaagttgcaaactggctgatcggagagaccttccgtctgatgaaagacaatggaatggagccggaagatttaacattctctccggagaacctggcaaaattaattgatcttgcggaggcaggaaccattaacagttctgtggcaaaagatgtattcaagcagattttccatgaggatatagatcctgagaaatatgtcgaagaacacgggcttaagatggtgaacgatgaaggtgcactccgtgagacagctgccaaagtgatcgcagacaacccacaggcagtcgcagacttcaaaggcggtaaagagaaagcaatcggagcactgcttggacagacaatgcgcgccatgaaggggaaagcaaacccaggaatggtgaatcaggtgctgcgagagttgttaaaataaaatttgatttgtctgttaggattcctgtaaatggaacagatacatttattgacctaatattgaaattaagattgatatattgacagcctgaaaaatgtctgctatattacaagtagaacacagagaaataataaactatatatgttcaaaacaataagagattcggaaggatgtggaaagaatgaaacgagattattatgaagtgcttgggctgtcaaagggcgcagaggataaagagataaagagagcatatcgtaagctggcgaagaagtatcatccggacacgaatcctggggataaagaagcggagaagaaattcaaagaagtgacggaggcgtactctgtactgagtgatccggagaagaagaaactgtatgaccagttcggtcatgctgcatttgatcagagcggtgctgcaggttccggatacggaaatgccggtacaggtggctttggaggattcggcggaaacggcggattcaaaggcggtacttaccgtagttatggtggaccgggaagtggatatcaggagtatcatttcgaaggtggcgacatggatgatatgtttgatgacattttcggaaatatgttccatggaggaagtacttcaggtcgcagcagaaggacatcaggatttaccggaggatttggaggtgaaagctttagatcaaaaggttctgatatcaaggcaggtatcactgtaggatttgatgaggctgcatttggtggagataaggttattacactgagtaatccggaaaatccgggacaaccgggacagtcactgaaggttcatattccagcaggtattgataacggaaagtcaatccgtttaagaggaaagggaatgccgggaaccggtggtggtgaagccggagatcttctgttgaaagtaacagttgctccgaaacctggatatgagcggaaaggtatggatgtatatacaaccgtatctgttccgtatacaacagctgtgttcggaggtgaggcattggtccatacactgtatggagatgttatgtgtaagattaaagagggaacacaatcgggttccaagattcgtctgagaggtaagggaattgtttcgatgaaagattcatccgttcacggagaccagtatgtgacgattcagattgaagtgccaagaaacttaagtttgcaggcaagacagaaattaaaagagtttgaagaaatctgtcaggggagttcaagaacagcataaataaatgaaaagaccagaggcttgttttacaaattgaaacaagaacctctggtcttttctgctgtttagaatattgctgtagctgtttagaagttactgtgagcagtaacgttttgcacaggtacaatttatagccactgactcagaaatttgaagccagtaacaaacgaattataattgggattctgctagtcacgttcccaacgaccggaagcaccacatggaagaaccaatcctgaatctgtaacaggaagtccgatctcctgagaatctacatgtccgttccaaggttttaattcagttgagatcatgtaggtaagtacggcaggagcaagtcctgttgtataagaattcacaaggaagaacagtgcatccttggaaagaatctttgtacaaagcttgatgagtggatggatcatatcttcaatcttccagatctcgccttttggtccacgcccatatgacggcggatccataatgattgcatcataagtgttgccacggcggatctcgcgttcaacgaacttcacacagtcatcgacaagccagcggatcggtgcatctcccagaccggaagaaaccgcattctcctttgcccatgtcaccatacccttagatgcatctacatgagtaacctgcgctccggcagctgccgctgcaagtgtagcacctccggtataagcaaaaaggttcagcaccttgaccggacgtccagcattcttaatcttctcagagaaccagtcccagttagttgcctgctctgggaagagtcctgtgtgcttgaaactaaatggttttaaattaaatgtgagagaaccgtaatggatctgccactgctgtgggagactaaaaaactcccattcaccgccaccctttttgctacggtgataatgtccgttcatctctttccaaccgcggttcttcttaggagtatcccagatgacctgcgggtccggacggacaagaagataatttccccaacgctcaagcttttcgccacctgagcagtcaagaatttcgtaatctttccaattatctgcaatccacatgaattagttaatcctttctacaaaaaatacttgtaatcatacagagacaatctcaaagaacgatacatttttgaaattgtttcgttttatatcgtctataacatttctattataatagaaagtcctatggtaatgcaatgaaaattttcagattcagaaatcaagtgttgccagccggtattgttcacacgatgtgtgaacagcattcttataaatggactggttaaaatgcactataaacctactaaacacataggaatataaaaacaaaacgccgaaaacatataaaacatattgacaaggtaggttaataagatgtattatacgcctatcgaatctgagatgcgaaaaagtaacagagttacatcaaatgatagatggagtgatgagtatgataaaagtagaacatgcaaacaaaacattttccgggaaatacggtacagtacatgcgctgcaggatgtcagcattcatgtagagaaaggtgacatctacggaattatcggattttccggagcaggtaaatcaactttgatccggttggtaaatggattagagacaccggatacgggaaatgttatagtccagggagaaaatcttgggaatctgaaaaaaacgcagcttcgcaagcttagaagaaaaatcggaatggtttttcagcaatttaatcttcttgaatcaaaaacagtgtatcacaacattgcattgccattgattcttgaaaaggcaccaaaggaagagattgataagaaagtaaaagaagtactccggtttgtagaactggaagataagaaagatgtttatgtaagccagctttcgggaggacagaaacagagagtgggaatcgcaagggcactgacaacaacaccggacattctgctctgtgacgaggcaacaagtgcactggatccgcaaactacagaatccattctgaaactgcttaagaagattaaccgggagatgggagttacaatccttctgatcacacatcagatgcaggtcgttcagatgatctgtaataaagtagcagttatggagaacggacaagtagtagaggccggaagtgtgcttgatgtattcggaaagccacaggcacatgttacaagaagattcgttcagactgtagtaaatgatcagattcctgaaagcattctaagtcttgtgaaagaacagaaagaacatttccgggtagagaggcttaagtttatcggaagcagtgtaaaacgacctgtgatttcagatatctgtcatgtggatggaattgtagtaaatattctgggagcgaccgtgcaggaattgcaggagaatgtaatgtgtgtgttcattttgcagctgatcggaacggaagagaaaatattagaagctgagaaacagattgatgagaatggagtaatcagagaaagagtggaggcgatttaatggaacaagagtattttggagtatcactggaaaagttactgaccagtggtggacagacattatatatggttgcatggtcactgattattggaacaatcataggaattattttggcactgattcttgtgctttgccgtaagggaggactgatagagaatctgatcctttacaatattgtaagtatctatattaatatagtaagaagtattccatttgtgatcttactggtagcgatcatgccgttgacaagggcaattgttggaacgaccatcggaagtacagcatcacttgtcccgcttgttatttatatcagtccatatcttgcacgcttgatggaaaacagtttactggagattaatcccggtattctggaagcggctgaagcaatgggggcatctacctggcagacgattcggtattttctgcttccggaaacacttggatctatcgtactcgcattgacaacaggtacgatcgggttgcttggagcatcagcaatggctggatatgtaggcggaggaggtgtcggagacctggcactgacttatggatatcagaggatgaatacaccattgatgatctttactgtagttgtactggttgtatttgtacagatccttcagcttgcaggaaatacaatctcaagaaaactcagacaacatagataattgattaagaaagaacgaggaaaattatattatgaaaatcaagaaaattattgcaggattattagtagcgacaacagcattcagcctggcggcatgcggaaattcaggttcaggagatacgaagaaaagtgacgcggatacatcagagaaaaaggaaatcgtctatggaaaatcccagggaccatatacagaacttttcgaagatgcaatcgttccaattcttgagaaagaaggatatactctgaaagctgttgacctttcagatcttcagacagcagatgttgcactgaatgatggagatgtagatgtcaatgtagaacagcatacagcatacatggacagtttcaatcagagttataacgcagatctggttgcaatcagtccgattccaactgttccggcaggagtttattcagaaaaatacgattctgtagatgaaatcccggatggtgcgaaggttgcagtcccaaatgatgcgtccaacacagcacgctgctatctgatgcttcagaaaatcggctggatcaagcttgacgagaatgctgatccatccacagttacacaggatgatattgtagagaacccacataatattgaatttacagaaatgaacagcatgacaattccggcagcagaatctgattttgattatattgcaatcacaggaagtgttgtatataatgcaggcattgatgcttctacagcactggccaatgaagatatttcagattatcttgtacttcaggttgttgtaaaagaagagaacaaagatgcagattgggcacaggcaatcgtggacgcataccactcagatgaatttaaacagtatatgaaagaaaacaatgatggattatggtggatcccggaggagcttcaataattaagaaaggcagtgatgaaaatggatcagacagaaaaattaatcctagaagcaatcgatcagcacagagatgagatcattgaatttgccagagatatatacgatcatggagaacttggatataaagaattcaatacagcagaaaaaatcataaagaagatgaaagaattaggtctgcgtacagaaaccggacttgcaattacaggaacaaaagcgtatttaaatgaagaaaagaaagatacagcaagccttgcacttcttggagagcttgatgcacttaggattccggagcatgctcatgcgaatccagagacagatgcggcacattgctgcggacatcatgcacagatggctggaatctttggcgcggcactggctcttacagttccggagatcgcggaaaaactggatggacaggtggtattttttgcaacaccggcggaagagtatggtgaaattggattcaaaaatgaactgcgtgcacagggaaaaataaaatatggcggtggaaaatgtgagctgcttcgtatcggcgcatttgatgatattgatctttgtattacacatcacattgcaccgggggatgacatcatagtaggaagtggaaccggaaatggatttgtatctaaagtgatccgttgtttaggtaaggcagcccatgcggcaggaacaccggaacaaggtgtaaatgctctgtcggcggcgtcacttggtctgcaggcactcggtctgaatcgagagacatttcgtgatgaggattgtgtccgtgttcatccgatcattacaaagggtggcaacctggtaaatgtagtgcctgatgaagttgtagtagagacattggtaagagctaaaacaatcgaggcatttacagatgcagcgaagaaaacagaccgatcctttcatgcaggagctactgcaatgggagcgaaggttgaaatcacaacacttccgggataccttccgacacttgcggaagaagcactcccagaattaaaaagagcagcagaactttctgcaccggaaacaaatgtgatcgaggcatcaggacatacgggcggatctacagatgtcggtgatgtccagcacttaatgcctgtatatacatttaatacaggtggtgtaaagggtggactccatcaggtagaatttgaagtgacggatgaggaagaagcttatattgtcactgcgaagatgtttgcacttggagcctatggacttttgaaagaaaaagcagcaagaagcagagagcttgttaaaaattataagccggtatttgaaaattcagcaaagtatgcggagtttatggatcagtttgattcgaaagaagtgttagaataattctatacatttccctacttttatggtataatttaaaagttattttaatgatttatcgatttaatgtgatgaacagtcgcgtaataatatcataaaagaaaggaattgaagaagtatgttatctacgatagaatcagtaaatagtgctgtgaataactttatctggggcgttccggctatgatctgcattattggagtcgggctttacttaagtatccggaccggcttccttcagatcagaaaatttccgtatgcgatgaaagtgacgatcggaaggatgctccgcaaaagagatgcatctgacggtgcactgactccgttccaggcagtttgtaccgcattggcggcgacggtcggaaccggaaatatcgctggagtcgcaggagcaatcgcaatcggagggccgggcgcagtgttctggatgtggatctcagcacttcttggaatgtgtacaaagttttcagaagttactcttgcagttcatttccatgagacgaatgcggaaggagatcgtgtcggtggaccgatgtattatatcaaaaatggtctgaaaaagcattggcactggctggcttatctgttcgctgcattcggagttctgactgtattcggaacgggaaatgcaacacaggtgaatacaattacaacagcaatcgattctgcactttttaattatggaatcatagaaaaggattctgttggaacattaaatctgattatcggaattgtacttgctatcatgatcggcatgatccttcttggaggaattaagagaattggacaggttacagaaaagcttgttccatttatggcagcaatttatgtaattttggcacttggcgttgttgttctgaatttccagaacattccgagcgtatttggatccattttcgaaggcgcattttcaccggcatctgtgaccggaggcgccgtgggatctttctttatgagtatgaagaaaggtgtttccagaggaatcttctctaatgaggcaggacttggtacaggttctatcgcgcatgcatgtgctgatacaaaaaaacctgtgaaacagggatttttcggaatcttcgaagtatttgttgataccattgtaatctgtacattgacagcactcgttattctgtgcagcggtgttccggttggatatggagaggcggcaggagcagaacttactattcttggatttacatccacttatggaaactgggtatctatctttacagcggttgcaatgtgctgtttcgcattttctacgattatcggatggggattgtacggaacgagatgtgtggaattccttcttggtacaaaagcgaataagccattcatggtactctatgcactcgttgcaattgtaggtgctacaatggaacttggattgatgtggaatatcgcagagacattcaatggtctgatggcgattccaaacttgatcgcagtgttcttattgtcaggtgtagttgtaaaacttgtgaaagaatattttgcgggtgaaggaaaagaaagttaaaaacagaataaagaattcaaagctctgatgatttaaaaaatcatcagggcttttttgagtgcataaatatacaaagcaatttataaaaataccatagaaattttcacatattagcaaataaaacaaaaagtataagaaatgaaaaagaaattggaataaaaataaacaaaagtataagccaaataaagaaagaaaatgtgcaattttacgaaaaagtgaaatttattatattttttgtcctatttcgtccaagattttattcaacgactatgatatgattcttagacagtcaaatgtaaaaaaatatatgtttgaaatgtgatgaaaaagtgtatattctgtgaactgtataaataaacaatgtggatgatatatgttatgcaactaacgcaaacaacagaggttataggagctgttgaaatataaagaatggaaaggaggtttctgcaggcagtaatgtctgtaaagttgaaatacacagggaactgtgaaaacaacataggaacagaaaaggaaaactgttcagttaagtaaccaggaggtaaaagaatgaggaagaagtttaaaaagcttgttggaattacaacagcagtggcaatggctgtttcattagttccgacaaacgtttttgcagaagaaccagaagtggcagtagcggaagaatctgcaaagaacgataatcttttaagagtctggtatgatgaaccagcgacagattggcagacgcagtcattggcaattggaaatggttatatgggaggccttgtattcggtggtattaataatgacaagatccacattaatgagaaaacagtctgggaaggtggaccggctgattcttatgattatacctatggtacaacaaatccaattgatacagatgcggaccttcagaaaatcaaagacaatctgaatgcattgcgtgaaaaattagatgataaatctgagttcgtatttggttttgatgaggattcctatcaggcaagcggaactgacacaaaaggtgaagcaatggacgaactgaataagttgatgggagatctgacaggatatgatgcaccgacagattatgcaaacttatttatttctaacaatcaggatgaaaaaaaggtatccaattatgtcagagatctggatatgcgtacagctctggcaacagtaaattacgattacgaaggtgttcattacacaagagaatacttcaacagttatccagataacatcatggcagtacgtttgagtgctgatcaggctggaaagattagctttgatacaaatctggagaacttaattaacggaactgcttatacaaacacagttgatggcgatacaatcacaatgcgtgatgcattgccaacgaatggtttgaatgtagaggcacagctgaaagtgatcaatgaaggcggaagtctttctaccggtacaaatggtggaaatcctgcaatcactgtatcaggtgcagacgcagttacattgatctttgcatgtggaacagactacaagatggaacttccaaacttccgtggtgaggatccgcataaagctgttacagcaagaattaatgctgcagcaaagaagggatatgaagcactgaaagcagatcatgtggcagatcatgatgcattgttctcacgtgtggaactgggatttgacgaagagattccacagattccaacagatgaactgatcaaaaaatatcgcaacatgatagaaaacaatggtggcgatattcctacttcagcagaacagagagctttggaaattatgtgttaccagtttggtcgttatctgacaattgctggttccagagatggtgctcttccgacaaatcttcagggtgtttggggagaaggatggttcacatggtatggagattatcatttcaatatcaatgttcagatgaactattggccaacaatggcaagtaatttaagtgaatgtatgaaaccatacaatgatcttttgaatgtactgaaacaagcaggtcgtaatgcggcagctgcatcatttggcatcaagagtaacccgggtgaagaaaatggatggcttgtaggctgctttagtacaccgtatatgttctctgcattgggacagaaagataatgcagccggatggaacccgattggttctgcatgggcacttcttaactcttatgagtactatctgtatacaggagatacacagtacttgaaagacgagttatatccgtctatgaaagaagttgcaaacttctggaatgaagctctttactggagtgagtatcagcagcgttatgtatctgctccttcttactcaccagagaacggaccgattgtgaatggtgcatcttatgatcagcagtttatctggcagcattttgaaaatacaattcaggcagcagagacattaggagttgatgctgatctggttgcagagtggaaagataagcagtcaaaactggatccagtattagttggtgatgacggacaggtgaaggaatggtttgaagagacatctatcggaaaagcacaggcaggagatcttgaggaaattgatattccacagtggagacagagccttggtgcacagaattcaggagtgcagccaccgcaccgtcatttgtcacatctgatggcattatatccatgtaatctgatcaacaaagataatccggaatatatggatgcagcaattgtatctctgcaggaaagaggacttgatgcaacaggttggtcaaaggctcacaaactgaatctttgggctcgtacaggacatgctgaagaagcattcaagcttgtacagtcagatgttggaggaggaaattcaggattcttaacaaaccttttctgttctcatggtgcaggagcaaactataaagaaaaaccaatcttccagattgatggaaactttggttatacagccggcgttaatgaaatgcttcttcagagtcagcttggatatgtacagttccttccagctattccagagcagtggaacacaggtcatgtagaaggtattgttgcaagaggcaattttgatattgatatgaaatggtctaacggaaaagcagaccgttttgcaattacttcaaacaatggaaatacttttacaggtgaatatgacaatattgcagcttatacagtaaagaaatctgatggaacaaaggttgatgtagatgttatttcagacaacaagatctctttcccaacagtggcaggagaaacttatacaattgactttaatgcatcaccagataaacttcagggtgtaatcgatgcagcaaaagaaatttcagcacagatgacagatgaacttcttgctgaacagaaagcacatttagatgaactcatccagacagctgaaaaagcaatcgcagaagaaaaatctgacgaatatgagaatcagtcacagattctcagcaaagcaattcaggttgcaaaagctgcaatgacattaaaagattcctattatcctgcaaaggaagtatatgatggaagagatctggaagaagactgggcaagttatattaagacagcagcagatttaaacaatcagttatctgcagccgcagaacttctgaaagatacagaagcaacagtaagtgaattagaactgatgaaagaaagtgttgatcatgcgaaagatgctcttccggagctttggaacagactgacactgaaaatcacaccagataatcagctgacacttggagaaaacgatttagttgagattacaagtgagtttgatgatcttcagatcagatatacaacagatggaaatgatccgatgtggttctctgatgagtataaagccccatttgctgttacaaaatcaaaacagaaaattaaagctgctctgttccttggaagacgtcagatgagtgaagtatttgaagcagaatatctcagcgaagaaggattaaattccgcagaaggcattgaagagaattacattgctgctacagataacggaacatcaggagatagtgaagggattgcaaatgcattggatggaaagaatggtacagcatggtatccgtcaactttcccaacggtgcttgaagttgagtttgaaaaaccggttaaggtaaatacagcagaagttgcattagactggttctatgagaactattatgacattacagatatggatatcgaatattggaatggagatgcatgggttccggcagttgagggagcttcattgggagatatttccaaggtatttacatttgatgaatttgagtccaacaaagtaagacttaagattaacgaagcatggaaatatgcttattatggttatatcggtattgatgcattcagactgtttaacctgaacgataaagtaacaacagacaagagtcttttggatcaggtaatctctgttgcacagaaatgtgtggacaatggagaagtagatgaagcaatcgagagtgtacaggagagctttaacaaggtatttgcttatgcaaaatcagtcagtgcaaatatccagtccagtcagagcacaattgatggcacgagagatgcattgattgaagaaatccaaaaacttggatttaaagcaggagataagacaaatctgcagaatcactatacattatacagtgcattagatcttgatcagtatattgatggagaagaaaaagatgcatttgtagaagcacttgagaatgcgaaagcagtgattgaagatggtgatgcaatggaggcagatgttgtagaggcagatcagcagcttcttcgtgcagcagatgcattgatcaagaaaggagataagacatctcttcaggcactggtagattccacagctgactataagaaagagaattatctcagtgcaggatggaacacattcgaagcagcacttgacgctgcaaagaaagtgcttgcagatgagtctgcaacacaggaagacgtagacaaggcaaaagaagttcttacatcagcaatgacaggacttcgttacaaagcagacaagtccgtattagaagaaatcattggaaaagcaaaagcaatggatctgacaggatacagcgcagaaaatgttgcactgttcaatgcggctcttgctaaagcagaagcagttatggcaaacgaggaactttccgtttacgaacagccaatcgttgacgcagcagttcttgatctgcagaacgcaattaaagctttgaatgatgagaaagataatgcatcaaaaccatccgactcatcgaaaccgtcgaacccatctaaaccgggaagtggaaatggaaacggtgctacaggatctgacaagaataatggatcaggttctgatggaaaacatcaggcgacaacagcaggtaagcagaacggtggaaacacagtgaacggaacaagcggaaaagcaactaagacaggtgatgtcacaccgatcattccggcggcagcaggtgttattctttcaatggcagcaatcgttgttgtactgaaaaagagaaaaagataataaaaaagaatcaggaagtggaacagaaaccgggaatggtgaaattcagaaaacagtaacacggaaggattcatgagagacagagaggactttttagacgaagtcctctctttttcgagtgaagaaaaaagttttatatccccccacctggcttgtgggtttattctgtttcttatacaataaattgcattgacagaaaatagacagcatgaggagaaaacgatgaaacgaagaaaactatcacaggtgatcgcggtaacattagcagtctgcatgttggcaggttgtgtacttacaggctgtggaagcaaatcagataatgcaaataaagagactacacaaagcggatctacattaatctatggaagtaatgattacacaaggatcaatccggctattgatgagcatggagagattaatctgcttctgtttgacggtctgacagcacatgatgagaataatgagatagtaccgggactggcagaatcatgggagctggatgacgcgacaaatacttatacattccatcttagggatgatgtaaattggcatgatggagagaaatttacagcagatgatgttgagtttacgatcaaagcaatcatggatccggacaatgaatcagagattgcttctaattatgaggatgttacagcaatcaatgtgatcgatgataagacgatttcttttacacttcgggataagaatgtggcatttctcgactatatgacaattggtatccttccgaaacacttactggaaggcaaggatatgcagacagatgaatatttccataatccgatcggaacgggtccgtataagattcaggagtgggatgaaggacagagtattacacttgtaaagaatgagaattattataaaggagctccgaagattgatacaatcgtgttcaagattgtaccggatgataatgcaaaggcacttcagttaaaatccggtgagatcaacctggcaaaggtgacaccgaaggatgcacagaatttcacagatgatgatacttttacagtatatgatatgaagacagcagattacagaggtatcctttataactttaataatgagttctggcagagaaacaaagatgcaattcctgcaatcagttatgcaatcgatcgtcagaagatggtaaacagtgttcttctgggagaaggaattgtagcttatggtccgcttcagagaaataaatataataatgaagatgtagagaaatactcttatgatccggcaaaagcaaaagaagtgttagaagcagccggctggacgttgggagatgacggaatctatgagagaaacggagagaagctttcttttacaatcaatgtgatggaaggtgatcaggtgcgcgcagatcttgcggctatcgcatgtcagcagctgaaagaagttggagttgatgcaaaagcacaggttcagtcagaaatcgactgggcaaatcaggaagcatttttgatcggatggggaagcccgtttgatgctgatgaccatacatataaagtgtttggtacagataaaggaagtaattacagtggatattccaatgaacaagtagacacttatctgacacaggcaagacagacaagtgatgagaatgagcgtaaagaagcatatgcaaagtttcaggttgcacttgcagaagatccggcatatacattcttctgttattgcgatgtagattatgtgacgaataagaaaatccagggaattacaaaggatacagttcttggccatcatggtgttggaattttctggaatgtagaggattggacgatcgaatgaaaatagaagaaatactggcagtgaagcatttgtcagttgaatttcaaacttcagatggaaagaaacaagtagtaaaggacgtctccttgtcgttaagacaaggggaggtccttgctcttgttggagagtcaggatgtggaaagactgtactgtgccgatcaattttgaaattactgcccaagagtgcgtctgtgacaggcgaagccattcaatataaagatcagaacctgatcggatataatgaaaaagagatgcagcagatccgaggacatggaatcgcgatggtctttcaggatccacagagtacgttaaacccgacgatgacagttggaagtcagatggaagaggctattttgctgcatgaaaaagctttaaatcagaagaaaagagagaaagatttcgagaaaaataagaagaaatcagcaaaagagcgggcaatcgaactgatgaagctcgttgggatcaaagacgcagagcagcgttatgatctatatccgtatcatttttcaggtggaatgcgtcagagatgtgtgcttgcaatagcacttgcctcaaatccaaagcttttaattgcggatgaaccgacgacagctttggatgtgacaatccaggcggagattctgaaactgttgaaaaaattacagaaagaattgaatttaagtattctgtttatcacacatgatctcggagttgttgctcagatcgcagaccgggttgctgtaatgcaggatggaaatatcgtggaattggaagaagcaaaacagcttttcacagctccaaaacattcttatacaaagaaattgcttcatgatcatccttattatatgcatagaaatgaatcaaaattaataagtgaatcagaattgcatgaaaaactggtagaaatctcacatttgtcctacttctatcctttagatagaaaaagggtgtttcaagcggtgaaagatgtgtcctttgagataagaagagacgagatttttggactggtaggtgagtcaggatctggaaagtcaacggttggaaaatgtctgatggggattctaagtccggaagcagaaacattttcttatgatgggataaatcttcttgataaaaaagcaaaaaagaaaaatgcgagaagactgcaaaaagagcggcagatgatctttcaggattcaacatcttccttaaaccagaaaatgaaggtagagaagatccttgcagagccattggaaatacataaagtattttctgacaagaaagaacaacatgattttttatgtgaaatgatggaagaagtggaattgcaggaagaacagcttcacgtgtggccaccggagttgtcaggcggacaaagacagagagttgcaatcgcaagagcatttgcaatgaagccgaagctcttgatcgcagatgaaccaatcgcttcgctggacgtaactacacaggcacagatggtgaagctgtttcggcatttacaaagagaacatgactgtgcaatcctttttattgcgcatgatctttcaatggtgcgtctattatgcgaccgtgtcggagtgatgaaggatggaaaacttgtggagataggagaaaccgagcaggtgtttgaacatccgcagcatttatatacgaagaaacttctggaggcgattccgattccggagatttcaggagaggagcagagtgatgaagaaacaatggcttagaaaaatcggactgatcttgctatctgtttttgtgctctcacttcttgtgtttgtaatgtcgcggctggcacccggggatccgctggtttcttattatggagaacgtgcagagagaatgtcggtggaagaacatgagcatgcaatggaacgacttggattaaacgaacctatccctgttcagtatgtgaaatggcttggaaatgcttttcagggggattttggaatctcttataaatataaacaagatgttcttacagtgatcgagggacgtttagttaatacattattgcttggcggaattggttttatcctgacatttggactggcacttttgcttggaattttctgtgtgtattatgaaaatcagcttccagaccggattttgcgtaaggtgggaacaatcacaagctgtattccggaattctggttgtcacttatattgattttgatttttagtgtgaatctaaagctccttccgggaagtggggcatatgatcttggccaatcggcaaatccgttgagcagattgacgcatctgattcttccgctgacagttgttgtgctgagccacctttggtattatgcgtatctgatccgtaaccgattgttggaagaaactagaaaagactatgttttactggcgaaggcaaaaggaatgtcacgaaaaagagtattgttctgtcactgtgtgaaaaatattatgccatcgttcatcagtctgatggcaatttcacttcagcatgtgatcgaagggacgtatatcgtggaaatggtattttcctatccgggaatcggaacgctttcttttgaaagtgcaaaatatcatgactataatatgctgatggtgctttgcgtatttaccggtatttttgttattgcaggaaatgtgatcggacagtctgtcagtgaatggatcgatccaagaatgaaagagataaacatgacaggaaaggcaagtcaaatataaggtggagaagatgagaaaagctgagaagaataatagttcatccgaaaatagaataaggatattcaaaatgaatgattttgaaaaaaacaagtcttctgtaattgccggaagtattcttgcagtcatcgtatttgcctgtgttttctgtcgtttctttatgacgaaagaccctacatacatggatctgaagaactgcaacatttcaccgaataaagagttcttttttggaacggatacgatgggaagagatattttttcaatgattttatacggtggtagaatctcgttgtttatcgggttgatatccaccgtgttatcgactacgattgcggtgatctacggatccttcagtggaatcgcaccggagtggattgatgaactgatgatgcgttttacagaaattttattgagtattccttcaattctgttaattatctttcttcaggcactgacaggaaagaactcagttgttgcaattaccgtagtgattgggtttaccagttggatgaatatcgcaaaaatggtacgcactgaggtacgacagctccgtgagagtgaatatctgattgctgcaaaatgtatgggtggaagtttctggcatattttacgtgtacatttgctgccgaattttgtttcatcaattatgtttatggtcgtgatgaacatcagaagtgcaatcatagcagagtcaacattgagctttcttgggattggtcttccgatggaaatcatttcctgggggagcatgctctcgctttctgaaaaggcattgatgacaaactcctggtggatcattctgattccgggaatcgtgcttgtaatcacgttactgtgtattacagagctgggagaagctttgcgtaaaaatgtgaatcagaaagaaggcaatttatagaaaatttctatagaaaagtttgataacctatagtaaaaatgttatactgagaaacagaagcctggaggttaaaatacctgaacgaataggtaaaggagagcgatagaatggtaacagtaaatgctatgggagataaatgcccggttccggtaattaagacaaagaaagcattagatgctttgacagctccggagacaatagaagttctcgttgataatgagacagcagtggctaatgtgacaaagatggcacagagtacaggcgcaacagtaacacaggagaggcttggagaggatgaatataaagtgacaatccaggcgcttgcaggagaaggaactcagacagcaccggcgggtgcggtttgcgattgtgttccaacaggggatacggtagttgtgatttcttctgacaagatgggaagtggaaatgatgagctcggaaaagtgctgatcaaaggttgcatctttgcaatcacacagcttgatgagcttccaaagaagatgatcttctacaacggtggcgctaagatcacatgtgaaggatctgactctctggaggatctgaagaatctggaaagccagggcgttaagattgtgacttgcggaacatgtctggattattatggaatgaaagacaagcttgcagtaggaacagttacaaatatgtatgatattgtcgagtctatgaataatgcaggtaagattgtgaaaccttgttagaaacataggaacagttacagtaattcgaaaatgtgatggaaaagctgctgcaacagctttttcgtataccgagggaattattttgaaaaagtattcgaaaggaagtgggcgaaatgagtaagggactcaaagagattcatctgacacagatgacaaagacagctggttgagcggccaaaatcggtcctgagacccttgcccaggttctgggtaagctgcctaaattttccgatgagcgtctgcttgtcggtgttgagacatcagatgatgccgcaatttataaaatatcggatgagactgccatgatacagacactggatttcttcacaccggttgtggacgatccgtatctgttcggacagattgcagcggcgaactccttaagcgatgtatatgcaatgggaggagagccgaaggttgcattgaatattgtatgttttccaaattgtctggatccggagatcttaggggagatcttgcgaggcggagcagacaaggtgttagaagcaggagccgttctggtcggaggtcattcggtgcaggatgatgaaccgaaatacggactctcggtaacaggcttcgttcacccggataagatttataagaattacgggtgtcagccgggagatgtgctggttctgaccaaacagcttggaagtggtattgtgaatacaacagtgaaagcacagatggcttccgaagcagccgcagatgaagctgcgaaagtaatggcttcattgaatcagagagcgaaaagagcaattgagaaacacacgatccacgcatgtacagatgtgacgggatttggattgctgggacattgtacagagatggctgaggcaagtgacatgactctggaattatatccggagcagattgaatatatgacagaagcgattgcatatgcaaggatgggactcgttccggcaggagcatataagaaccgggagtttgcagcagaaggactggatgcaggagatatagaagaggtctatttagatctgatcagcgatccgcagacttcaggaggacttcttgtcagtgtcccaagagaagaattagattgtctgttagcagactttgaggcagtgggaatggaaacgaaagtttcagttgtaggctgcgtcaaagagcggcaggaaaaactcatccaactaaaaaaaggaaaaatggaaatgctgtaagagatttcttgttactgttcacagtgctttgtgagcagtaacggtttcttgcggcatttcgctgtagaaagagaaaataaggagcagcagtagttggaacagtcagatcagaataagaaaagagaaaatttacagaaagaaaagaatcagatcttccgcctgcttccgcgagtagatgacttgatgaagaaagaaaatgttcagagactggcagagaaagaaggatatgagcgtgttctcggagcagtcagagattctgtggagaatctgagaaatgaaatctcacaaggaatcaaaaagggaatcagtgagcatgaagcgaaagaaatgattcagaaatttctgtatgagatagaatcaagttcaaagaaatcagaagtgaaccatcttctggaacaagaacagaaaaaggagattcaaccagtttataacggaacaggagtaatccttcataccgggcttggacgtgcaacgcttagtcatgagattgcggaaaaactgaaagcagttgcagagaattattccagtctggaatatgatttacaggatggaaaacgtggaaacaggaccggatatgcagaagaattgctttgtcagatcacaggagcagaagcggcaattgttgtgaataacaatgccggagctgtacttcttgccctgagtgcattgacaaaaggaggagaagtgattgtctccagaggagaacttgttgaaatcggagggaaattccgtattccggaagttcttgaattaagcggtgctattttgaaagaagtcgggacaaccaatcgtacaaggatagaagattataaagcagcagtcagtgaaaagacgaaagcatttttgaaagtccacacaagtaattacagaattgtcgggtttacagaatcggtaagtgcagaagaattgtatgaattaagtactggtctgatagaatgcacgcaggaattgccacctgaaaacttcgagaatcatacggaacgaagcggaattccagtgattgaagatctgggcagtggtgtacttataaatctggaggaatatggtttatccaaagaaccaaccgtacaggaagaagtaaaggccggtgcagatgttgtttgttttagtggcgataaactatttggtggagcacaggccggagtccttgtaggaaagaaaaaatatattgatcagatgcgtaatcatccattgcttcgggctcttcgagcagataaatttacaatgacagcaatagaagaagtattgaaatgttatctggatcagaaagaagcggttcaaaagattccaacactgagaatgttgacaagacctgtggaggaaataaaagagaaagcgatggtctgtgctgatagatggaatcaagagggagcgtccgttcagattcaagtggaaaaatgtatttctaaggctggtggtggtgcacttcctgagacggagattccaagttatggagtggcattggaatcaactgagatcaccgttgaagaaatagaaagcaggatgagaaatctttcagttccggtaattggaagaataaaggaagggcgtttccttttggatatgagaactttctcggaagaaggaatcgaatatctggcgacacagatcagacatgttatggaaagaaaacataactaagaaagaaaaacagcattaagaaagggactgcattagatggaaagacatgtgatcatcggaactgccggacatatcgatcatggtaagacgacactgatcaaggcattaacgggaagagatacagaccgtctgaaagaagagaaagcacgtggaatcacaattgatctagggtttacatggatggatttgacagacggagagcgtgtcggaatcattgatgttcccgggcatgagaaatttctctctaatatgactgcaggtgtggtaggaatggaccttgttcttcttgtaattgcagcagatgaggggattatgccacagacaagagaacatctggcaattttacgccttctgggtgttgagaatatccttgttgttttgaataaatgtgaccttgtggatgaggaatggctggagatggtagaacagcagatctgtgaagaaatgcaacagttgcttacagtaggtcagagaaataatcaggtagaagataagctggaatataatgtggatattgtacgtgtttcagcaaaatcaggagctggaatagaagaattaagaagtcaaatcctgaaatgtgtaaaaaagcagaaagaaatgtggaaaatccctgcatttccaagacttcctgtggacagagtattttcaattaaaggaagcggaacagttgtgacgggaacacttcttgacgggaaaattcattcgggagatcgggtgatgatctatccacaacaaacttcgtgcagagttcgtggagttcaggtgcatgagcaggaggcagaagcttgtgaagcaggtcagcgaagcgcactgaacctggttcagacggaccgaagacagagcagtgatgggaagtttgtgtatcgaggaaatgtgatcgcaccggaaggaagtatgaaagtcagccactatgtgaatgcaaaactgacacttcttccacaaagtaaaagaagtattgaacatcagactcgattacatttttatagcggaacaacagaagttctgtgcagagcagttccgttgtcctgtgagaaaattgagccgggggaatcagcctatgtccaattaaggttagaagaacctgctgcgttttgtccgggggacaggtttattgtccgattttattcaccactcgagacaatcggtggaggaattatccttgaaatgggagaaaaaaaagagcgaaaatatcatgatggggttttacaaagactggaactgttggaaaacaatctttggaatcaagaaaataagtgttcaaaggaaatcccagatcaagaaaagagcctgcaggaacagatttctttagaaaagagaattatggatgaattggaaagctggttgtctgctcatccatatcgaagaggaatgccaaagacagttcttttcaatcagatcagcaaagggaaaaaggaacagaatcgggaaattcagaaatgtcttatactattggaggaacatggaaatgtcggttgtataaggttgcaacaggaaaattctagtatagagctgatttctccggagggatataaagtaaaagagacggaagaagtttctaaattaagagaaatctttgccagtcaatcagatgagaataaagttttctttttgaacaaagtggaattggaaacattttttgagtcagcaagaaaaacgaaaaagaaaagtggaatacaaagtcaagatgaattgatggaaattctgaattatatgcaggaagaaaacgaaattacagaggtttgtgagagtgtttatacaacaacagagattacgtttaaaattagaacagaagtaagccgtatgttatctgtatctaaagtgattacactgagtcaggtgaaagaagtatttcagacaagcagaaaaaatgccagattgatttttgaatatacagatcgaatcggatttacagcaaaagaaggtgcacagacagaacgctccgcaggaaataaattgcaaagagaacaaatcagaggaaagtaaggggagagtgaatgaacttaaaacaactggaagcatttgtgaaagtagcagaaacaaaaagtttttcggaagcggcaaagcagttattccttacgcagccaactgtcagtgcacatgtgtctgcattagaaaaagaactgaatacctgtttccttataagaaatacaagaggagttgagctgtcagagagtggaaaagagctttatgcttatgcggtacaaatgcttgaaatcgaaaagacaataaaaggacggtttggaaaagaaataaaaccggagggaaatgtacttcgtattggtgcttcaaccgtaccggcgcaatatattcttccaaatgtaatgtctacatttcatgcagaatatcctggtgaaaaattgaagctttttgagacagacagtaaaggagttatcgatatgattctttcccatcatattgatattggatttacaggaaccgtgattgagaaaggaaactgtaaatatcttccattttatgaagacgaattagttgtgcttactccgtcaaatgagaaatttgttgaaaagctttgtggtggacaaatattggcggattggatcatggacgagccggtgatcttaagagaagaaggatccggaacaaagaaagaagcagaaaaaatgctggcagaacaagggattgatatgaagaaactgaagcttgcagcattgatggagaatcaggagacaatcaaaagatctgtaagtaaagggatgggtgttacgattttgtctaaacttgcggcagaagaggaattgaaaaatggaacacttctggcttttccactgggcagtcaaggtggaaagagaatgatcaaccttgtctatgatgcagaatatccgttgcttccggcagcagagcgttttataaagatgataaagagaatgtatttgaagaaagaaaatacagggataggtgaatgcaaataacacgccctatttatagaaaaagcctataaatagggcagatccattacggattcctattagacggaaacagaaaagagaagtatactataactagtgatttgtatctaaaaagtaaacgatataaacacatacagaaaggaaaagaagccctatgatctacatggataatgcggcaactacattacagaaaccggaagaagtaaaacaggcgattctctatgctctcgagcatatgggaaatgcagggagaggcggaacagaagctgcacttgatgcttcgagaagtatctatgcagtaagggaaaagcttgcagattttttcaatgcagaaagtccgacaagaattgcatttactgcaaattctacagagagtcttaatattgcattaaaaggtttgtttcaaccgggcgatcatgtgatcacaacagtgctggaacataattcggtattgcgtccgctgtattggtgtcaggaacagggagtagagcttacaattctaaactgtgacgaaaagggaaatctgtcatatgaagagatggagaatgcggtgcgggacaacacaaaagcaattgtgtgtacgcatgcttcgaatctgacaggaaatatgatcaatctgaaacgggtaggacagattgcatcgaagaagcatattttgtttgttgtggatgcttctcagacagcaggtgtttatccaattgatgtgcaggaacttggggttgatgtattgtgcttcacaggacataaaggtctgcttggaccgcagggaaccggagggctttatgttagggaaggtgtggaaattcgtccacttctgtgtggaggaagtggcgtggatacttataacatgcatcatccgtcccagatgccgacggcacttgaggccggaactcttaatgggcatgggattgcaggacttggcgcagcgattgattatctgaaccgtacaggaattgatgtgatccgtgagaaagaacttcatctgatgcgcaggttttatgatgggatttctcagatcccggatgtgaaagtctatggagattttacagcagaggaaagagctccgatcgtgactttcaatctgggagattatgactcttctgaagtcagtgatgaattaaatgaagtttatgggattgcgaccagaccgggagcacattgtgcaccactgatgcacaaagcactcggtacagtagaacagggagctgtccgattcagtttttctcattacaatacagaagaagaggtcgattttgcaattcgtgcaataaaagagttgtagagaaagagaggaaaaggaaatgaatttgtttgattcaaagaagaaactgggaatcgccggtgtcgtaatggggctggtagcagcaacacttgcttattttggtaacccagcgaacatggcaatctgtattgcgtgttttgtacgtgatacagcaggagcacttggacttcattccgcagaaccggtacagtatgcaagaccggaaatcatcggaattgtcctcggtgcatttattatttcaattgcgacaaaagaatatcgtgcaacagcaggatcttccacaatcgtacgttttgtactcggaatgattcttgtgatcggagcacttgtattccttggatgtccgcttcgtatggtgatacgtatgtcagccggagatctgaatgcatgggtagcactgatcggatttgctcttggtgttgctacaggcgtgtttgcactgaagaaaggtttcagccttgggcgtgcacatgtgacaaataaagtgagcggaagtgtacttccacttcttatgatcggagtacttgtacttgcacttggaacaaatcttttaaagagtagtacagcaggtccgggaagtatgcatgcaccaatcattatttctctgatcggtggacttctctttggagcatttgctcagaaatcaagaatgtgtttcgcaggaagtatccgtgatatcattcttatgaagaactttgacctgatcacaatcgttgtaggattcttcgcagttatgcttgtatataatgttgcaacaggacattttgttcttgcattcaatacacctggagtgatcgctcactcccagcacttgtggagtattcttggaatgtatgcagtaggatttgcagcagttcttgcaggaggatgcccgctgcgtcagcttgtacttgcaggtcagggatcatctgatgcaggagtaacagtgatcggtatgtttgcaggtggagcacttgcacataaccttggcctggcagcaagtggaacagcactgaatgctgagacaggtgagattgtagccggagctgttccgccagcaggtaagatcgcagcaattatttgtattattgtatgttttgtaatcgcatttacaaacaagagaagcgaagcaaaataaggagaaaatagttatgagagaagtagatgcaagaggattatcttgtccagaaccattgatgctgacagcagaagcgattaaaagtgacaatagtccggtaaaggttcttgtgacagaaccacatcagaaaacaaatgtggagaaatttgcaaaggatcacggaaagaaaacaacagtagaagaaatcgaagatggatttgctgttgtgatcgagtaaaatgaaatagtaaaaagccctgctccctttactgaatgtgaatttggtaaagggagcattttagtaataaaaaatgttttctatttgtctggtttcggttataataagagagttgagaaaaaggaaaatgtgaggataacagcatgtatatttcaacaaaatatctgcatgtatttcttgatatcggagatgcgctgctttcaagcggggcggagatatttcgtgtagaagatacattgaaccgtatgggatatgcatgcggtgcaacacagatgaatgtgttcgtgatcacatcgagtattgttattacaatggaatttccagaagaaaatgtacgaactcagacaaggagaatccgaaagaccggaggaaatgattttgagaagctggagaaattgaataatttgagtagacagttttgccagaatcctatgtctcctgaagaactcagggaagtcttcgatcagattgacaaagttgttccgacacagacaggaaaactcgcagggagtattctggcagcttttagctttgcacttttctatggaggaaatctttgggatgcattactggccggattagcaggcatcttaatctggggagcacagagacatataagaaagtattgcatgaatgaagtgacgtttcaatttgtggcatcatttcttgcgggatgttttatttgtgttatggcgaggttttttccggctctgcacgtggataagattatgattggtgatattatgttattgatcccgggattgatggcaaccaatgcaattcgtgatatattgattggagatacgatatctggggttatgcgttttatagaggcaatgcttcttgcagcagtgcttgcacttggatttatcggagcaatatttctgattgggaggattggttgatgacgtatattgttcaattatttacaggtgcagcgggttcggttgcatttggcatactgtttcatatgaagaagaaacaccttccattggcggcacttggcggttttctgggctggctgttatttatcatctgcagaggattctggggaggtgtgttcttcccaacattggcagcagcttttggaatcgacttatatgcggagatacttgcgcgtagttgcaggagtacttcgacttcattttttgtaacatcggtgattccactgattccaggaagcacgctttattattgtatgagaagtgttgttgaagggaatttacatcaggcatggaattatggacgagatacatttttatatgcattggggattgcggcaggtatgagtattgcctgggcaatctgtgattttttaagaaagataagaggaaaacaggagatctcataaatgagaaagaaagaattaaaacttgtggtgacatttcacacaactgcggatgcgatggcgatggaaaaagcgtgcaaggcagaggaggtaccgggcagactgattccggtgccaagagtaatctcggccggttgtggacttgcctgggcggcaccgcttgaggcggtagaacagatcaagcatgtaatgcaggaaaaggggattgagagagaagaacttcatgagtgcatggtctaatctttggattcaaggcaaaatgcgcataatctgtgttgaacagtggagcgatagatatggaagtgaaaagtaatcatgtttccaaaaaagaaacgagaatatgagaatgaacgttgattctgagggcggtttgcgctatactctattcagtaataaaagaaaaaaggttactgttcacacgagagtgtacagtaacgaaaaaagtgctgctcacagatcagtgggagcggtaatgaaaagactgctgatagttcggcagagaaggagcataatatgagaattacagatgacattttatatgtaggtgtaaatgatcacaacattgatttattcgagggtcagtatatcgtgccgaatggcatggcttacaattcctatgtgatcaatgatgagaaaattgcggttatggatacagtggatgcagcttttggcgatgagtggctgaagaatattgcagatgtattgaatggagcaacacctgattacctgatcattcagcacatggagccggatcattcagcaaatattcagaaatttctggaagtatatccgaatataaaggtggttggaaatgcaaagacatttacaatgatcggaaacttcttccgtgacctgaaacttgcagacgagaacaagctggaagtgaagaataaagatacactgacacttggaaaacatgagcttacatttgtatttgcaccgatggtacattggccggaggtaatggtaacatacgatagcaaggataaggttcttttctctgcggatggattcggtaagttcggagcgcttgatgcagaggaagactgggattgcgaagcacgccgttactatgtcggaattgttggaaaatacggagcacaggttcagaatcttttgaaggttgcagcaacactggatattcagacaatctgcccgctgcatggaccggttcttacagagaatctggagcactacattggacagtataatacatggtcttcttatggaacagaatctgaaggtgttatgatcgcgtacacatctgtttatggaaatacaaagaaggcagttgaacttcttgctgagaagctgaaagaaaaaggatgccctaaggtcgtagtaacagaccttgcccgtgaggatatggcagaggctgtagaagatgcgttccgttacggtaagatcgttcttgcttcaacaacttataacggagatgtattcccgctcatgaagacatttatcgagcacttgacagagcgtaactatcagaataagacaattggtctgattgagaacggatcctgggcttctatggctggtaaagtgatgagaggcatgtttgagaagagcaagaatatcacatggcttgagacttcagtaaagattatgtcttctatggatgagcagaataaagcggacatcgagaagatggcagaggaactgatgtaagcaattgtgatttacaggaaagaaagattctgttaggatagaatcagatggcggagcggatgaccagatatcagctggcgtttgctccgtttcttaataaatacatcaatgatgaattgtctaagcattatggaggcagaagagtaactggtgtgcttcctggtcttcaaaaccagtgtggggcgtggtacgtcccgggtgggttcgattcccacatgtctccgccaaaagaaaggaaaaagaatatgggtatgaatcagacgccggtgtccgaacgagtgcacatcggcttttttggtaagcgcaatgctggaaaatcaagcgtgatgaatgcggtaacaggacaggatcttgcggtagtttctgatgtgaaaggaacaacaacggatccggtttataagacaatggaacttcttccgttgggtcctgttgtgatgatggatactcctggaattgatgatgaaggtgaactgggtgaacttcgtgtgaagaagagctatcaggtgttgaataagacagacattgctgttgttgtgattgatggaacgtgtggcgtcagtgaagaagatctcaagataacagagcggattcagaaaaagaacataccttatataatagtactgaataaatgtgaacggtttacacaagaagatgagagattgcgggtacaggaaaataccgcaagttatttgaaaacagagaaagagaagattcttcttgtaagtgcagcggataaaagcggaatttatgagctgaaggaagaacttggagcattgaaaggaaaggaagaggaagaacgaaagattgttggagatcttcttgaaccgtccgattttgtagtgcttgttgtgccgattgacagtgcggcaccaaagggacgcctgattttgccacagcagcagacgattcgtgacattttggatgcagatgcatccgctattgttgtaaaagaaacagaacttgcaggaacattagcttcacttggaaaaaagccgaagatggttattacagacagtcaggtgtttggtagagtgtcaaaagatacaccaaaggatatcttattaacttccttttcgattctatttgcaagatataaagggaatctggaaacaatggtacacggagtaaaggcactggatattctggaagacggtgataaagtactgatcagtgaagggtgcacacatcacagacagtgtgatgatattggtacggtgaagattccacgctggctgaaagagtatacagggaaagaacttataatagagacttcttcaggaacagaattcccagatgaccttggttcatacaaaatgatcattcattgtggagggtgtatgctgaatgaacgcgaaatgaaatacaggatcagttgcgcacaggatcaaggaatcccgattgcaaactatggaatggtgatcgcatatattcatggaatattgaaaaggagtctgagtccattttcggagatagaaaaactcttataaaagtaaagaatgcgttgctggttgcacatcgtgtgaacagtaacaagaatgcattataacggaaatgacgccgctttgctggatctgcaactccagcaggcggcgtcatttctatggtatgtaattgagaggatcctttagttaccagacagaaacatctgcacacgaaactggggaattcctacaaagaggctgtgcgctgacggtactgctgtggcagggatgttcttggggaaaacatccggcgttagcgtactgcatgataactgaagtatctgacctgtaaaaacgaataaaaaaagacagtttctcctaggtaaataggaaaaccgcctttggtcttacaagtcgaaataataatatcattcgaacagagggatgtcaagtatttgagaagaaaaaattatgagaattatgagaatcttaaatggggttcagtttaaacacatcatgtattgaataaaagggggaaacaataatgatataaaacgagttccttctatatataataggaagtgaatcgatcaataatcaaatatatatacatgagaaaacacaagaataaagaagaaaaagattgtacttgaaaaaaaacaaaaaaagtacttgcaattttgtgccctctcggatatactaagagagctgtgacatgatagcaatgaagcgcgaggttgctgcccagcaaatgaataagctggtgcaggttttccgtggagcgaatgtcaagttaggaaactggcgacaagtcactgtacgaatcaaaaactgattactatttgccccaatgggataaccagggtaggagtatgaaacaacgtgtgagtttctcacgacacacacgggagagtgtacagtcaccgcttgtcgtactgatgtgaaaagtacgaaaaggaggcgactttttttatggcaagtcaagtaatgagaatcacattgaaggcgtatgatcatcagcttgttgatgcatccgcaaagaaaatcatcgaaactgtaaaaaagaacgggtcacaggtgagtggaccggtaccacttccgactaagaaggaagttgtaacaattctgagagctgtacacaagtacaaagattccagagagcagttcgagcagagaactcacaaaagactgatcgatatcatcacaccaacacagaaaactgttgatgcactttctagattagaaatgccagctggtgtatttatcgacatcaagatgaagtccaaataataaggacatcttaattttaaacagtattcctaaaatttaggatgagcgcgaaagcgttccgctgtaaatcacaggaggtaattataatgaagaaagctatcttagctacaaaagttggaatgactcagatcttcaatgaagaagacggagttctgattccggtaacagttctgcaggctggtccttgtgtagtaacacaggttaaaacagttgagaatgacggttacagcgcagtacaggttggatatgttgacaagaaagaaaagattgtcacaaaagacaacagtggaaagaagtccatcgctcacagaaacggtgtgacaaaagctgaaaaaggtcattttgacaaagcaggcgtatccggaaagagatatgtaaaagaattcagatttgagaacgctgaagagtatacacttgctcaggaaattaaagctgatatctttgcagcaggagacaagattgatgcaactgctgtttcaaaaggtaaaggtttccagggcgcaatcaagcgtcacaaccagagcagaggacctatgactcacggttccaagttccatcgtcatgctggttctaacggttcagcatctgatccaagtaaggtattcaaaggtaagaagatgccaggacagatgggtaacaagaagatcactgttcagaatcttgaagtagtaagagttgatgcagagaacaatctcatcctcgttaaaggttctgtaccgggaccaaagaaatgcctggtaacaatcaaagagacagtgaaggcaaactagtctgacagctaagaaaggaggaacatacagatggcaaaagtatctgtttacaatatcgaaggtaaagaagttgatacaatcgaactgaacgatgctgtattcggtgttgaagttaatgagcacctcgtacacatggcagttgtaaatcagcttgcaaacaatcgtcagggaacacagaaagccaagacacgttctgaagtttccggtggcggaagaaaaccatggagacagaaaggaacaggtcacgcaagacagggatcaacaagatcaccacagtggacaggcggtggagttgtattcgctccagttccgagagactattccttcaaaatgaataagaaagagaagagagcagctcttaagtctgcacttacttccagagtagaagagaacaaattcatcgttgttgatgaactcaatttcgacgaaatcaaaacaaagaaattccaggcagtactgaacaacctgaacgttaacaaagcgctggtagttcttgaagatggaaacaagaatgttgagatttccgcaaagaatatcccggatgttaaaacagcacatacaaacacaatcaacgtatatgacatcctgaaatacaacacagtaatcgctacgaaagctgttgttgcagcaatcgaggaggtgtacgcataatggcaaacattcagtattatgatgtaatccttaaaccagttgtaactgagaagagcatggagcttatggctgacaagaaatatacattccttgtacacacagaggctacaaaatctcagatcaaagaagctgttgaaaaaatgttcaacggtacaaaagtaaaaagcgtcaacacaatgaaccttgatggtaagaacaaaagacgtggaatgactttcggaaagacagctaagacaaagaaagctgtagtagcactgacagaagacagcgctgatattgaaatctttgaaggtctgtaaaaaataagacattatacggtgcaaacccgtgaaacaaataatcagagcaaacgaaaggagagacagtaatgggaatcaaaacatataacccatatacaccttccagaagacagatgacaggttctgatttctcagagatcacaaagacaactccagagaaatccctcctcgaatccaagaagagaaaagctggccgtaacgcacagggtaaaatcacagtaagacatcgtggcggcggagctaagaagaaatatagaattatcgactttaagagaaagaaagacggaattccggcaacagttgttggaatcgagtatgatccaaatagaagtgctaacatcgcactgatctgctacgcagatggtgagaaagcatacatccttgctccagaaggacttacagacggcatgacagttatgaacggtgctggcgctgaggttagagtaggaaactgccttccactttcagagattccggttggtacacagatccacaacatcgagctgtacccgggaaaaggtggacagctggttcgttccgctggtaacagcgcgcagctgatggcgaaagaaggaaagtacgctacactgagacttccttcaggagaaatgagaatggttccgatcatctgccgcgcatctatcggtgttgtaggaaacggtgatcacaacctgatcaatgttggtaaagcaggacgtaagcgtcacatgggaatcagacctacagttcgtggttccgtaatgaaccctaacgaccatccacacggaggtggagaaggtaagacaagtatcggacgtccaggaccgtgtactccatggggtaaaccggcacttggtcttaagactcgtaagaagaacaaatcttctaacaagctgattgtaagaagaagagatggtaaagcgattaaataatcagattcacaaggaggttagaacctatggctcgctcacttaaaaaaggaccatttgcagacgaaagcttacttaaaaaagtagacgctatgaacgctgcaggtgataaaacagttataaagacatggtcacgccgttctacaatcttcccatcatttgtaggtcatacatttgccgtacatgatggaagaagacatgtgcctgtatatgttacagaggatatggtaggccacaagctcggtgagttcgttgcaacaagaacttacagaggacacggaaaagacgagaagaagtcaaaagttagataattttcatatattttgaaaggagggttcatccatggcaaaaggacatagatcccaaatcaaaagagaaagaaacgagcagagagatacaagaccttcagctaagatttcttacgcaagagtatctgttcagaaggcatgtttcgttcttgatgccatcagaggcaaggatgtacagacagcacttggtattttagcatacaatccaagatatgcttcaagcgttatagagaagttactgaaatcagcaatcgcaaatgctgagaataacaacggtatgagcgttgagaacctctacatcgaggaatgctacgcaaacaaaggaccgacaatgaagagaatcaaacctagagcacagggtagagcttacagaatcgagaagagaatgagccacatcacaatcgtgctcaatgagagataggaggacaatatgggacagaaagttaatcctcatggcctgagagttggcgttatcaaagactgggattccaaatggtacgcagaaaaagatttcgctgacaatctggttgaagaccacgagatcagaaagtttttaaagaagagattatacagcgctggaatctctaagattgaaatcgaaagagcatccgatcgcgttaagatcatcgtttatacagctaagcctggtgtcgtaatcggcaagggtggttccgagatcgaaaaggtgaaagcagagcttgcacagttcacagataagaagctcatcgttgacatcaaagaagttaagagaccggacaaagatgcacagcttgtagctgagaacattgctcagcagcttgagaaccgtatctccttcagacgtgctatgaaatcatgcatgtccagaactatgaaggctggagcactcggagttaagacttccgtatccggacgtcttggcggtgctgatatggctcgtacagagttctacagcgagggaacaattccgctgcagacacttcgtgctgacatcgattatggattcgcagaagctgatacaacttacggaaaagtcggtgtaaaggtttggatttacaaaggcgaagttcttccgactaaagcagataaggaagggagagatagataatgttaatgccaaaaagagtaaaacgtcgtaaacagttccgtggtactatgaaaggtaaggctcttagaggtaataagatttcttacggtgaatatggtatcgtagctatggaaccatgctggattcgttctaaccagatcgaggcagcccgtgttgctatgacacgttacatcaagcgtggtggtaaggtttggatcaaaatcttcccagacaagccgatcacagcaaaaccggctgagactcgtatgggtagtggaaaaggtactgttgagtattgggcagcagtagttaaaccaggccgtgttatgtttgagattgcaggagtaccagaggaaacagctagagaggcacttcgacttgcaatgcataaattaccttgcaaatgcaaaatcgtttctcgcgcagacttagaaggcggtgataacagtgaaaattaatacatttgtaaacgagttaaaaggaaaatccgtagaggaattaaatgaagaattagtagctgctaagaaggaactctttaatctgagattccagaacgcaacaaatcagttggataatacaagcagaatcaaagaagtaagaaagaatatcgctcgtatccagactctgattacagaggctaaaagagcatagtgaaaggagcagcaaccgtggaagagagaaatttaagaaaaacccgtacgggtaaggttgtcagcgacaagatggacaaaacgattgttgttgctgttgaagaccatgtaaaacatccactttacaacaagatcgtaaagagaacttacaaacttaaagctcatgacgaaaacaacgagtgtaaagttggagatacagtaaaagttatggaaacaagaccgctgtccaaggacaagagatggagacttgtggaaatcatggagaaagcgaaataattatttgaaggaggtttacctgcatgatacagcaagaaagcagacttaaagtagcagacaacacaggtgcgaaagagttactgtgtatccgtgttcttggcggttctacaagaagatacgccaacatcggagatgtgatcgttgcaactgttaaagatgcaacaccaggcggcgttgttaaaaaaggtgatgtcgttaaagctgttgttgtccgttctgtaaaaggcgctcgtcgtaaagacggttcctatatcagattcgatgaaaatgctgctgttattataaaagacgatttgaacccacgtggaacacgtatttttggaccagtagcaagagagcttagagagaaacactttatgaagatcgtttctctggctccggaagtactgtaaggaggtgcctgagaatgtcaactatgaaaattaaaaaaggtgatatggttaaggttatcgccggaaaagataaagataaagaaggcaaagttattgccgtagataaaaaagacggaagagtcctggttgaaggcgtcaatatgctgacaaagcacacaaagccaagcatggcaaaccagaacggcggaatcgtacatcaggaaggttacattgatgcatcaaacgttatgttacttcataacggaaaagcaacaagagtaggcttcaagatggatggagacaaaaaagttcgttttgctaaggcaacaggcgaagttattgattaattcaaggaaggaggtccaggactttgagtagactgaaagagcagtatcagaatgagatcgttgatgcaatgatcaaaaaatttggatataaaaacatcatggaagtgccgaaacttgacaaggttgtaattaacatgggtgtcggtgaggcaaaagacaatgctaaacttctggagtcagctattgcagacatggagaaaatcgcaggacagaaagcggttgtaacaagagcaaagaattctgtagctaacttcaagatcagagagggtatgccgatcggatgtaaagttactttaagaggagagaaaatgtacgagttcgttgatcgtctgatcaacctctcacttcctcgtgtacgtgacttcagaggagtaaacccgaacgcatttgacggaagaggtaactatgcacttggaatcaaggagcagcttatcttcccggaaatcgagtacgataagattgacaaagtcagaggtatggatgtaatttttgttacaacagccaagactgatgaagaagcacgtgaattattgacacagttcaatatgccattcgcaaagtaaaaaggagagaaattcatggctaaaacatcaatgaaaatcaaacagcagcgtgcaccaaagttctccacaagagaatacagccgttgcagaatttgtggtcgtccgcatgcatatttaagaaaatacggtatctgccgtatctgcttccgcgaactggcttataaaggacagatcccgggtgttaaaaaagcaagctggtaagacgaaagcaactatatactgtgaaataacataggaggaatcacacacatgactatgagcgatccaattgcagatatgcttacaagaatccgtaatgcaaacactgcaaaacatgatacagtagatgtaccggcatcaaagatgaaacttgctatcgcaaacattcttgttgatgaaggatatatcgcaaaatatgaccttgtagaagatggagctttcaagacaattcacatcacactgaaatacggtgctgacaagaacgagaaagttatttccggactgaagagaatctccaaaccgggacttcgtgtttacgctaatacagaggatatcccgaaggtacttggcggactcggaacagcaatcatctctacaaacaaaggtgtagtaacagacaaagaagctagaaaactcggcgtaggcggagaggttctttgcttcgtttggtaagccgaaagcaacttagtgagaacgaggcgtagccgaagtttgagcttagtgcgaggttgttctttgagctggcgagactacttgcctagcgaaaagaacttccttataaatgtaactgaaaacagagaagccaacgcagcttctccgagaatctaagttaaggaggataatggtatgtcacgtataggaagactgcctgtagcaattcctgcaggagtaactgtagaagttgctgagaacaatgtagtgactgtaaaaggtcctaagggaactcttacaaaagagcttccagtagaaatggaaatcaaagttgaaggcgaagaagtaatcgttacaagaccgagcgacttaaagaaaatgaaatctcttcatggtctgacaagaacactgattaacaacatggttgtaggtgtaacagagggatacgagaaagttcttgaggttaacggtgtaggttacagagctgctaaatcaggaaataaactgacactgaaccttggttattcccatccagttgagatgatcgatccagaaggaatcgagactgtacttgagggacagaacaagatcactgttaaaggtatcgataaagaaaaagttggacagtttgcggctgagatcagagataagagaagaccggagccatataagggcaagggaatcaaatatgctgatgaagtaatcagacgtaaagtcggtaagactggtaagaaataaataaggagagtgtgaaaatggttagtaagaaatctagaagcgaagttcgtagaaaaaaacacatgaaattacgcaaccgtttcagcggaacagcgcagagaccgcgtttagctgtattcagaagtaataatcatatgtatgcacagatcatcgacgatactgttggaaatactcttgtttccgcttccactcttcagaaagaagtgaaagcagagctcgagaagactaacgacgttgaagcagcagcataccttggaaaagtaattgccgagagagcaaaagctaaaggtattgatgaagttgtatttgatagaggcggattcatttaccagggtaaaatcaaggcattagcagacgcagcaagagaagctggtctgaatttctaaggaagggagaacacagatgagacaggaacgtattgatgctagtcagatggaattagtagaaaaagtggtatcaatcaagcgtgtaaccaaagttgttaaaggtggtcgtaacttccgtttcacagctttagtagttgttggtgatggaaatggccatgttggtgcaggtttaggaaaagctactgaaattccggaagctattcgtaaaggtaaagaggacgctatgaagaaaatgatcagcgtatctcttgatgaaaactcaagtgtaacacacgatgtgattggtaaattcggaagcgcttccgtacttcttaagaaggctccggaaggtactggtgttatcgccggaggaccggcgcgtgccgtaattgaggcggctggagttaagaacatccgtacaaaatctttaggatccaacaacaaacagaatgttgtacttgctacaatcgaaggacttaaagcagttaagactccggaagatgttgcaagacttcgtggcaaatcaattgaggagatcttaggctaatcaaccgagaagcccgatcaagcgcataggaggtaagattgaaatggcaaatttaaaagttacattagtaaagtctacaatcggcgccgtaccaaagcatagaaaaacagttgaggctcttggacttaagaaactcaacaaaacagttgtattgccagataatgcagctaccagaggtatggtacagcaggttagacatttagttaaagttgaagaagaggcttaattaagataaggaggtaatgtcatggacttatcaaacttaagaccggcagacggttcaaaacagagtgataatttcagaagaggccgtggtcatggttcaggaaacggtaagacagccggaaagggccacaaaggacagaaggctcgttcaggagctacaagacctggtttcgaaggcggtcagatgcctttatacagaagaattcctaagagaggtttcacatgcagaaactctaagacaatcgtaggaatcaaccttagcgcacttgaagtattcgaggatggcgctacagtatccgttgagacattgatcgaaagcggtattgttaagaatccaaaagacggagtaaaaattcttggaaatggagagttaactaagaagcttacagttcaggctaatgcattcagtgcaaaagcagctgagaagattgaagctcttggtggaaaagcagaggtgatctaatgcttaagtccttgcgtaaagcattaagtattgaggatatcagaaagagacttctctatacattggcaatgcttatcgttgttaggttaggatcacagttgcccactccgggagtagatccgacatttattcagaatttttttgcacagcagaccggtgacgcatttaacttttttgaggcgttcaccggcggctcatttacaagaatgtcagtatttgccctgagtatcactccatatatcacatcatctattatcatgcagcttctgacaatagcgattccaaagcttgaagagatgcagaaagatggtgaagatggaagaaagaaaatcgcagcgattacaagatatgtgacagttggtcttgcactgattgaatctatcgcaatggctgtaggatttggacgtcagggacttctggaagaatataatttcgtaaattgtgcaatcgttgtatgtacgcttacagctggtagtgcatttcttatgtggatcggtgagcgtattactgaaaagggagttggaaacggtatttctatcgtacttctgatcaacattgtttcccgtgttccggatgatttcgtgacactgtatacacagttcatgaaaggcaaaacaattgcaaaggcaggacttgccggtgttattatccttgcagttcttctggttgtagttgtgtttgttatcattcttcaggacggtgaaagaagaattgcagttcagtattccaaaaaagtacagggaagaaaaatgtatggcggtcagtcaacacatattccgttgaaggtgaatacagccggagtaatcccggttatcttctcttcttcactgatgcagacaccaatcgtgattgcacagttccttggaaaaggaaatggaactggaattggaagtaagatccttgcaggtttaaactccaataactggtgcgatccagagaatccgatttattcagtcggacttgtggtttacattttacttacaatattctttgcatatttctatacatcgattactttcaatccgatggagattgcaaataatatgaaaaagagcggtggatttatccctggaattcgtccgggcaaaccaacagttgactaccttacaaagattttgaattatatcatctttgttggtgcgtgtggtttgatcatcgtacaggtgattccatatttcttcaatggtgttttcggtgcaaacgtttcctttggtggaacatcacttatcattattgtaggtgttgtacttgagacaattaagaagattgaatcacagatgcttgtaagaaattacacaggatttttaaataataagagataacagttattgatattgttttctattaaacgtcttttagctcgctttgttctgtcctcaattgcaggacgaacagagcgggttaaacttgtataaggaggataaagatatgaaactcatcatgttaggagccccaggagcaggaaaaggaacacaggcaaagaagattgctgagaagtattctattccgcatatttctactggagatatctttagagcaaacatcaagaacggaacagaacttggtaagaaagcaaaaactttcatggatcagggtcttctggttccggatgagctggttgttgatcttgttgtagacagagtaaaccaggaagattgtaagaatggatatgtacttgatggattcccgcgtacaattccacaggcagaggcacttgatcgtgcacttgctgagatgggacagaagattgattatgcgatcaatgttgaagttccagatgagaatattgtaaaccgtatgtctggaagaagagcttgtgttgattgtggtgctacttatcatatcgtatatgctccgactgcaaaagaaggcatctgcgacaagtgtggcggagagcttatcttgagagacgatgataaaccagagaccgtacttaagagacttggtgtttatcatgagcagacacagccgctgatcgattattatacagaagcaggagtactcagagaagttgatggtacaatcgatatcaacgatgtatttgctgcaatcgttcagatccttggagagtaagttttgttgatttcattcaggaggattaaaaatgtcaaaaactgacgtgattgaaattgaaggagttgtagttgagaaacttcctaacgcaatgttcaaagtagaacttgagaatggccatattgtactggcacatatcagcggtaagctgcgtatgaacttcatcaagattctgccgggagataaggttacacttgagatgtcaccttatgacctgagcaaaggaagaattgtctggagagacaagtaagaattctacacatcaaataacgggaatgctgttgtttacaacgttccgtatctgaaaagataaaaagatattattttctgaaaagtatttttagaaaataatatcttttttaatttaggtcttgactttaccatatgttttgtggtaaagtatgaaatggtcatttttggagaggtgtgtccaaaaataccggaatatataggcagagcaaagtagggaaggaggatttgacatgaaggttagatcatcagttaaaccaatttgtgaaaaatgcaaaattattagaagaaaaggtagtatcagagtaatctgtgagaacccgaaacacaaacagcgccagggctaaggcattgaacacttgatgaggtattatcgaacctagtcgagtgatgctactgatgttttgtgcaattatcaagcggctgacagcatgacacgccaggaggtgtgtggagctgtttaatatacagtaaggatacatcgcatctgtccgcaggtaccgacagagcgtgtagtctgggcatctgacagacgtttgtcatctttatatgaaagagggaagatgctattgtatattgcttataatacccggcatttgcattggcggatgagagtatgatccgtgccgggaaagggtatgtagtttccgtacatacctgggctgggatatcggaaggatacattccggtaggatgcagcagtaaatgagttacaccagacttcatttataaaaagaagagactcatttcgcattcgcagcctcaattagggacaattaacaagaaaaccagaaaagaaaatggaggaaagacacatggctcgtattgcaggtgtagacttaccaagagacaaacgtgtagaaatcggtcttacttatatctacggaatcggtagaacaagtgcagaacgtatcttaaaggatgcaggagttaatcctgatactcgtgtaagagatcttacaagtgaagaagtaaagaaaatcagcgcagtgatcgatgagactcaggttgtagaaggtgatctcagaagagaaatccagctcaacatcaagagacttaaagagatcggatgctaccgtggaatccgtcatagaaaaggacttccagtacgtggacagaaaactaagactaatgcaagaacatgcaaaggtcctaagagaactgtagcaaataagaagaaataatatcgtataaaataaagaaagtaggttagtttaaatggctaagagagttgcgaaaaaagtaacaaaaaaacgtgtcaagaaaaacgttgaacgcggacaggcacatattcagtcatcattcaacaatacaattgttacactgactgacgctcagggaaatgctctttcatgggcaagtgcaggcggtctgggatttagaggttcaagaaaatctactccatatgcagcacagatggcagctgagacagcagctaaagcagcattagtacatggtcttaagacagtagatgtattcgtaaaaggaccgggatcaggaagagaagcagcaatccgtgcacttcaggcatgcggaattgatgtagtaagcatcaaggacgtaacaccggtaccgcacaacggatgtcgtccaccgaaacgcagaagagtgtaattatactctgctgtataagaaaagcagttatttaatagtaaatgttgacgcagcggcatgagtaccgctggcatgtataatattaggaggatagaaatggcagtaaatagagttcctgttcttaaaagatgccgttcattaggaatggatccgatttacctcggaatcaataagaaatctaacagacagttaaaaagagcaaacagaaagatgagcgagtatggtcttcagcttcgcgagaaacagaaagcaaaattcatctacggtgttcttgaaaaacctttcagaaactactatgcaaaggcaaaacagcaggaaggaatgacaggtgaaaaccttatgatcatccttgagtcaagacttgacaacgttgttttccgtcttggacttgctagaacaagaaaagaagctagacagatcgttgatcataagcacgttcttgtaaacggcaaacaggttaacatcccatcttaccttgtaaaggctggagatgttattgaaatcaaagagaacaaaaaaggttcacagagatacaaagagattcttgaagctacagctggaaacatggtaccagagtggcttgaggcagacgctgagaatcttagaggtacagtaaaagagcttcctaacagagaagcaatcgatgtaccggttgacgagatgcttatcgtcgagctgtattctaaataataatttgtaactgttcagagccaagcaaaatttcataaaacagctataaaatgcttgcatttttaagactgtttttgaaattttatttggcggatacgccacaccgacgaaatgcgtagcattttggaggttggctctgaacagttacaataattacgatttgaaaggattgcgcaggcatttatgcagggcaatcctaactaatctgaacaagttgtttagatacagttttgtaccccctcaacatatattaagcccataaggagggtctgtgtagtgtttgattttaataaaccgaatattgaaattacagatgtttcagatgacaagaaatacggaagatttgtcgtagaaccgctggagagaggatacggaactacgcttggtaacgcgctgagaagaattatgctttcttccctgccgggagcagcaatcagttctgtgaaaatcgacggtgtactgcacgagttcagttccatcccgggtgttaaagaagatgtgacagagattatcatgaacctgaaatctctggctatcaagaacacatctgagtctgatgaagtgaagacagcttatatcgagttcgaaggagaaggcgttgtaacaggtgctgatatccagtgtgactctgatattgagattgtaaacccggagcaggtaattgctacattaagcggtggcaaagacagcaagctttatatggaacttacaatcacaaaaggaagaggatatgtaagctcagataagaataagacagaagatatgccaatcggtgttcttccgatcgattctatctacacaccgatcgatcgtgttaacctgacagttcaggatacacgtgtaggtcaggttacagattatgacaaactgacacttgatgtctggacaaaaggtacaatggctcctgatgaggctgtcagccttgcagcaaaagtgttaagtgagcatctgaaactcttcatcgacctgtcagaggtagctcagcaggcagaagttatgattgagaaagaggatgacgagaaagaaaaagttcttgagatgagcattgatgaacttgagctttctgttcgttcttacaattgtctgaagagagccggaatcaacacagttgaagagctcacaaacaagactccggaagacatgatgaaggttcgtaaccttggtcgtaagtctctcgaagaagttcttgcaaaactgaaagaactcaatctggaactgaaccacggagaagaataatattctatatccgtactatgataaattatcaggacacttatgtcctgcacaggctgtgattacagttttgtgaattgcagcccgctgaagattgaatatcctggtggtaagcccgaagagcgcagcaggagcatttgattagtaagcccgaagatgcataaccaaatgttaattaatggaggaaatttgaaatggcaaagtatagaaaacttggcagaacagcaagccagagaaaagctttacttagaaaccaggtaacagcacttcttaacaacggaaagatcgttacaacagaagctaaggcaaaagagatccgtaagcaggcagaaagcctgatcgctcttgctgtaaaagagaaagataacttcgaagaagttacagtaatggctaaagtagcacgtaaagatgctgatggcaaacgtgtgaaagaagttgttgacggtaagaaagttactgtttatgacgaagttgagaagacaatcaaaaaagataagccaagcagactgcacgctagacgtcagatgctgaaagttcttttccctgttaaagaaggcgagaagagaaacatgaaagatgttgacatggttgcaaaactctttgatgagatcgctccaaaatatgctgatcgtaacggtggttacacaagaatcgtaaagattggtcagcgtaaaggtgacgcagctatggaagttctgatcgagcttgtttaatttgataatatagctgatttttgactctcatataggacagaaatgtcctgtatgggagttttttgcatattagtaaagtgtttttctaatatataaaaagctatgcttaggacgtacattttaatttacgtgaacaacgagccaaaacccttgcttgcacgagaccttggcgactgttgtgataacttgagaaactcggagagcgtgtttttcatagttaaaattgtcaagcaaaaatttgcttttgtgaaaaatgcacaaacgatgttaaataaataacgttaaaactttaacaactggtacattgacaattaattaacgaactagtatactaatacctgtaatcgggaaacataaaaacaacccgatcggataaaacttgcaggttacgaaaacagtgactataaaaatgatttattcaagtacaggaggaatactcagatggcaaagaaagaggcggcaaaaactgtagagacaaagacagtaaacaccggattcattgataacgttgaagctcttgaagcaaaaatgaaagagatgcgcgaggcacagaaaatcttcgctacatttacacaggagcaggttgacaaaatcttctatgaagcagctatggcagcaaacaagcagcgtatcccgcttgcaagacttgcagtagaagagactcagagaggtattctcgaggataaggttatcaaaaaccattacgcagcagagtatatttacaacgcatacaaagatacaaagacatgtggtgttgtagaagaagataaggcattcggaatcaaaaagatcgcagagccaatcggacttgttgcagcagttatccctacaacaaacccgacatcaacagcaatttttaaaacactgatctgcttaaagacaagaaatgcaatcatcatcagcccacatccggctgctaaagcatctacaatcgcagcagctaaagttgttcttgatgcagcagtgaaagcaggagctccggaaggaatcatcggttggatcgatgctccatcactggaacttacaaacacagtaatgagagatgcagatatcatccttgcaacaggtggtcctggaatggttaaagcagcttactcttcaggaaagccggcactcggagttggagctggtaacacaccggttatcatcgacgatacagcagatgtaagaatggcagttaactcaatcatccactctaagacatttgataatggtatgatctgtgcttctgagcagtctgtaacagtacttgaaagcgtatatgaggaagctaagaaagaattccagtacagaggatgctacttcctgaaaccaggtgaggagcttgacaaagttcgtaagacaatcatcatcaacggtgcgctgaacagcaagatcccaggaaaatcagcttatgaaatcgctcagatggcaggcgttgatgtaccgaagaatacaaagatcctgatcggagaagttgaatctgtagatatttcagaagaatttgcacatgagaaattatcaccggtacttggtatgtacaaagctaaaacatttgatgaggctcttgagaaagcagctcagcttgtagcagacggtggatatggacatacatcttcactctacgtacatccggcagagacagagaagatcgcaaaacatgcagcagcaatgaagacttgccgtgtactgatcaatacaccttcttctcacggtggaatcggagacctttataacttcaagatgactccgtcccttacacttggatgtggatcatggggtggaaactctgtatcagagaacgtaggagtaaaacatctgcttaacatcaagacagttgcagagaggagagaaaatatgctgtggttcagaacacctgagaaagtttacttcaagaaaggttctatgccggttgcactggatgagcttggaacagtaatgcataagaagaaagcatttatcgtaacagactccttcctttacaagaacggatatgtaaaaccgatcgaagataaattagatgaaatgggaatccagcatacatgcttcttcgaagtagcaccagacccgacacttcagtgtgcacgcaagggtgttgaccagatgagacagttcgagccagatacaatcatcgctcttggtggtggatctgcaatggacgcaggtaagatcatgtggatcatgtatgagcatccggaagcaaacttcgaagatatggctatggacttcatggacatccgtaagagagtatttacattccctaagatgggagagaaagcttacttcatagctatcccaacatcttcaggaacaggttctgaggtaacaccattcgcaatcatcacagacgctgacacaggtgttaaatggccaatcgctgactacgctctgcttccaaacatggcaatcgtagacgtagacaacatgatgacacagccgaagggactgacaagtgcttcaggtatcgacgttatgacacatgcaatcgaggcatatgtatctatcatggcaacagattacacagatggtcttgctatgaaggctgttaagcttgtattcgagaaccttccatctgcatacgagaacggagcaaacgatccgaaggctcgtgaagagatggcaaacgcttcctgtatggctggtatggcattcgcaaatgcattccttggtgttaaccactccatggctcataagcttggtgctttccaccacctgccacacggtgttgctaacgcagtaatccttacagaggttatgagatacaatgcagcagaagttccgacaaagatgggaacattctcacagtatcagtacccacatgcacttgcaagatacgcagaactcggacgcttcgcaggatgcacaggtaaagatgacaaagaagtatttgagaacttcatcgctaaacttgaagaactcaaagagaagatcggaatcaagaagacaatcaaagattacggcgttgatgagaagtacttccttgacacacttgatgaaatgtcagagcaggcattcaacgatcagtgtacaggagctaacccaagatacccactcatccaggagatcaaagatctgtacctgaaatgctactacggaaaataaatcgcattgcataagcaggcatatgaccgttagaatctaaaatatacgaagagagacagaatgatgttgaaaagcattgttctgtctcttttttacgtgagcaacgagctaaagcttacgattgttaataaatagacaatatataagaagtaaaaaatcttgttaaaaactgcacaaacttgctctgaaggggttttatttctaaaaattgtgagatataatgacatcatcaaaacaaagtaagagccgtaaggcaaaaggaacagccctgcagaactgagataaaataagagcagacaagaaggggcgttcaagatataaggaggtctatattatgaagttagaagaaaaaaatctcgtcgtgaaacgtgcttacaaatcagtctataaatgtgatgattgtatcgtgaaagtttttaatgaaggacatccgaagtcagatgtatttaatgaggctctgaatactgcaagagtagaagagacaggtctggacattccgaaggtaaaagaagtaactcagattgatggaaagtgggcaattgctattgagtacaaagcaggtaagacacttgaggacatgatggaatctgatatgaagaatctggaaaaatatatggaagactttgttgatctccagttacaggttcagagtaagaaatcaccgcttctgaaaggaatgaaagataaattagctcgtcagatcaatggattgaaagatcttgatgcgactacacgttatgaacttctgacaagacttgagagtatgccaaagcataataaagtatgtcacggagactttaatccgagtaatgtgatcgtaggaaagaatggaaagatgactgtagttgactgggctcatgcaacacagggaaatgcaagtgcagatgcagcaatgacatatttgcttttcgcactgaaagatcagaaagtagcagatctctatctgaaattgttctgcaagaagagcgatacagcaatgcagtatgtacagcagtggcttccgattgtggcagcagcacagttatctaaagaaaatgaacttgaaaaagattttctgatgagatggattgatgttgttgattatcagtagaaaatagagttgtttctaaaaaagaagcgctggaagatgaaaatgaaatcttccggcgcttcttaatcttctttttattattttaccaacttgtaaagaaaacgttatcgccaattacaacaccggttctgcttgtcgatggtgcgtacaggaagtaataacagtcggctacggcagcaagacgagctccgttgatcgcatcctgtgcaacctggatagaaagacttcgtggaccttgctttaatacacggtctaaggaacctgtccatacaggagcaaactgtccttgggcatagatgacatcatgaatagaattcggaaagcgactgctatatacacgattcataatgactgtagcaactgcaagcatagagtcgtaatcatagtgggcctcacattgcaggattgctgcaagaagtgtaaggtcatcagacgcaatggcagatccggaactattggagccaccagaagaacttgaacttccggaggatgaggaacctgaattgccggagttcccagaggaactggaagtattcgctttgttcgcactggcagcagcctcagcttttgcagcagcttcggctttcgcagcggcttccgcctgtttcctggcttcttctgcctgacgagctgcctcttcttctttggctttctgcagttttgcattcacctcattcaaattagtagaagttgcagcagcttttgcctgtaattgtgtctgctgtgtctgcaattggttctgtaaatctttcatggaagcctgctgtgcttccaggtctgctttctgatcggcaatctgctggtgaacatctttcagatcgttcagagctttgcggtcgtaattacttaaattttcaataaaatcagctttgtttagaaaatctgacatattttctgctgagaaaagcatctcaagcattgtagcacttccgtgctcatacatatatttgatacggcttttcatatcttcatactgctgatcttcgtttttctgcgctttctcaagatcatcctgtgttttgtctatatcactgttgaggatctcaacctgcatctcagtatcagatatcttctcactcagggtgaggatatcctggttgatgccttttaattcgttctcaagggcagaggtctggttttgcagattgtctatcgtgtctgtagcatagacaggaagtgcagaaaatacaattgcaagggaacaaatgagcgcggtgcccgtatgtaacttgctttttttgtaaaatgccataatctcaatatcctttctttaaatgacattgcatagttgttgaaaacctattatactataaaacagagaattaatcaaattggcacgaaatattttatgattgttttacaaaataattaaaaagatattgctttttgtaacaattgactgatagaaaatacagaagataaggaaaaaagtatggaaaaaaaggaaattaagattgttggattagatctcgatggaacacttcttacagataagaaggaacttcttccttatacgaagaatgtgatcagagaggcactgcagaatggtacagttgttcttgttgcaaccggaagaccatggacaggagttccggaagaattacgtgagcttccggggatggattatgcactgactgcgaatggggcaaggattatcgagacgagaaccggaaaggtactggaagaacatctgttatccaaagaagcagcaaaaaaagcaattgcaatcggaagaaaatatgatactctgttggaagtttattttgatgggcagggatatgctcagaaagatgagatcgcgcaggtgagaaagtatcataagaatccgaacatgtgggattattttctgagaacacgaatagcggtagacagcctggaagatctgctggatgaaaaagaagggaatcttgataaagtacagatgttgtttgcagatatggaagagagagaagaggcatggaaagagctggagcaagaaggcgtctttgaactggttggctctcttcaatataatatagaaatcaatgcagttggtgtaaataagggaaccggacttgtgaatcttggcaagatgcttggaatcaggcgggaagagatcatggcgtgtggggatggcgataatgatatcgcaatgctcaaggaagttggatttggggttgccatggcgaatgccgaagaaaaggtcaaagctgtagctgattatattacggagagcaacaatgatgagggggttgcaaaggccatcgagaagtttgttctgaaatgaggaggggaatcatgttagaagtattaaaggttatcattttaggaattgtgcagggaatcacagagtggcttccaatcagtagtacaggtcatctgattctggtagagcagctgatccaactgaagcagagcgaggcatttacgaatatgttcaatgtggtgattcagtttggatcgatcctggcagttgtagtaatttattttcataagttaaatccgttctcaccgacgaagacggaaaagcagaagaagatgacaattcagttatggattaaagtagtgatcggaacaattccggcactgatcggaggagtgttgctgaacaatctgattgaatcaaaactgagtaatgcatatgttgttgcattgatgttgattgtttatggtattttattcattgtaattgaaaaacgtaatgagacaagagaaccgaaagtaaaaagaatctctcagctttctgtgaagacagttcttctgatcggagttttccagatgatggcgatgatccctgggacgtccagatccggcgcaacgattgtcggagcactggcacttggggtttcaagaagtgttgcagcagagtttacatttttccttgcaattccggttatgtttggagcaagtgcactgaagttgtttaagttcggtctggcatttaccccaatgcaggtatttctgcttcttcttggaatgatcgtatcctttgcagtatctgttatagcgatcaagttcctgatgaaatatatcaagaaccatgactttaaggcatttggatattacagaatcgtacttggaatcgttgtatttttattcttcggtatccaggctttattcaaataagatatgtattattgaatagagtgcagtgtgttttactgttcacagttattgtgaacagtaaaattttgtatttccaaaagaaatcgtgcataattacgtcttgcattttatgaaaagcatgttataattattaacatgttttgaatttttatgcagaaaaaagaggaggagcttaagatgaagaagtttttatcagtatttcttactgcagcattagcagtcagcatgctggcaggttgtggtagtaagaacgaaacagtaacagcaaaggtaatcgatattgaccttacaaatgaagaatatgcatttggtgtggacaagaatcagccggaacttcttgagaagacaaatgagtttattgcaaagatcaaatcagatggaacacttgatgagatctgcaaaaagtatttctcagacggagagccggaagcagtaaaatcagcaacacttgatacatctaaggatcagttggttgtagctacaaatgcagcattcgagccatttgagtatacaaagggtgaagattattatggaatcgacatggagattgcaaagcttcttgctgatgaacttggaaaagagcttgtaatcgagaacatggattttgatgcagtttgtctgtctgtaagccagcagaaatgtgatattgctatggcaggacttacaatcaatgaagagagagaagaatatgttacatttacagattcttactattcagcatcccagcgtttgatcgttccaagcaatgttacaacattcgatgattgcaagacagcagatgacgttgcagctaagcttgctgagacaaaatcatctgaccagatcggtgttcagcagggaacaacaggtcagtactatgttgaaggaagcgaagattgggacttcccgggacttccggcaaaatgtgtgacatacaagagcggatcacttgcagtacaggatatgctcaatggaaatattcagtatgtgatcattgatgcagcaccggcagcagcaatcacagatgcaatcaacgcagttcagtaagagtatttactaagaatttacaggcagtaaaataacagaatttattaacgagggaaatacaggcagaagatgatgcatgcattttcctctttttggagaaaggaaacaaatggggaattttagtcagaaagtagacaaatttattgatatatttctgaatcagaatggctatgtgaaagtagttcagggactgcacaatactttgctgatcgcaatctgcggtctgattatcggtattgtgattggtactttgatcgctacagtccgtgtgattccgaaatataaaactcttccgagagtattgaatcatatttgcagcttttacgttgcattattcagaggaactcctatggtagttcagctccttatcttttattatgtactccttccgatttttggggtgaagattaccggagtacaggtttctatggttgtatttggtctgaatagtggtgcatatatttcagagatcatgcgaagcggaatccagtctgtcgatccgggacagatggaagccggaagagcagtcggactcagttttggaacaagtatgatgaagattgtgattccgcaggctgtaaagaacattcttccgacacttggaaatgagttcatttctcttattaaagagacatctgtagtaagctttgttggcgcagctgacctttatgttgcatttaactatatcggaagtaacagctacgaattcatggtaccgtaccttgtaatggcgttaatctacattgcacttgtgcttgtgatcacattacttgttaaattattagaaaggagcctgaagaagagtgatagacgtaattaatctgcaaaaaagctttggggacaaagagattctgaagggaatcaatgttacgatcaataaaggcgatatcgttgcggtgctcggaccatccggctctggtaaaagtacatttttacgatgcttgaactgtatggaagacccgacaggcggaagtattatcttcaatggtgttgatatcgcagatatgaaggttgatattaatcagcatcgccgccatatgggaatggttttccagcatttcaatctttataataataagacagttcttcagaatgtcatgatggcacctgcatatctaagatgtaaggacattgataaggcaaagaaaaagaatcgtatgatcaaatttaaaaatatgttccgtggaagtgacaagaaggaagaactgattccgatcactgagacaaaggagcagatcaagaaagaagtaaaggagcaggcaatggctcttttgaagagaatcggattggaagataaagcggatgtgtatccgtctacactttccggtggacagaaacagcgtgtcgcgattatccgttccatggctatgaatcctgacgtaattctttttgatgagccgacttcagcacttgacccggaaatggtaggagaagtacttgaactgatgaaagatctggcaaaagagggaatgacaatggttgttgttactcatgagatgggatttgcccgtgaggttgcttcaagagttcttttcattgatgaaggtcagattaaggaagaagctgccccggcagaattctttgaacatccgaaagatccaagacttcaggagttcctttcaaagatcctgtaaaagaaaatgcgtagcattttggaggttggctctgaacagttacgaaaaaatatttaatttttaatctatagaatatctgtttggtattgtgttacaatattgaacagatatttttatatataaggaaatggtattgaatgaaatgtaatagaaagaaaaaatacgaagcagatgctttggcatgtgagaggctgcaagagacagtagaaccacttgttgaatggtttcgggagaatcagagagatcttccgtggcggaagcatgtgaatgcgtatcgggtctggatttcagagattatgctgcagcagacgagagtggaagcagttaaatcttattacacacgattcctggaagaactgccggatatcaaagcgctggctgaagtgccggaagacagactgcttaagctgtgggaaggacttggctactacaacagggcgaggaatttaaagacagcagcacaacaggtaatgaaagaatataatggtgtattcccggatacatttgaagagataaaaaagttgaagggaattggcagttatacagccggtgcgattagctcttttgtttatcatcagcagaaaccagcggtagatggcaatgtttttcgcgtggttacgagaattctggaagacagtgatgacattatgaaagcaagtacaaggacaaagatagaacgtatgcttgaacaggtgattccggcagaggcaccgggagattttaatcaaggattgatcgaacttggggcaatcgtctgtctgccaaatggagaaccaaggtgtgagagctgtccgataaggaaattttgtcttgcataccaggatgaatgtcagatggactatccggtcaagaaaaaggcgaaagagcgaagaatcgagaaaagaacgattctaagattttgtgataatgaggaaattgcgattcgcaaaaggccgggaaaaggactccttgcaggattgtatgaatttcctaatgtagagggacatttaacacaaaaagaagttatagaatatgcaaaagagtcaggtcttacgccggtgcgcgtgaagaagctgccaaaggcgaagcacattttcagtcatgtggaatggcatatgaccggatatgagattttggtggatgagttggaaaaagaatttcaaaatcctgagatcatatttgcaggaaagaaggacctggagaaaaattatgcaattccgagtgcattttctgcatatctataaatgaagaggatgagaatactgtggtagctgaaaatccggaaaataaaaatagagcacttaaaatagagtccactctgttttattgaaaaaaagggcgaaatatgttataatatctcttatagtttaaaatgcatacgggagagttttagcagaaatgagtacaaaaacagaattatcgaagcagcagaaaaaatcacaggaaacaaaggaaaaaatctttcaggcagcgaagaagattcttcagaagagcggatatgaaaaattgtcaatcaagaatatctgtgaagaagcaggcgtgtcgaacggaagtttctatcatcactttaagacaaaagatgatttgctgtcttattatatagaagaccagcctacgatgggaccggatctgctggagacaccgaaaagtctggaagatgtaaaggagggaattgtccgtgtttatttgaattatgtagcttattgccgtgagcttggtgtagaatttatggcagggtattatgatacaaagaatcaggcattgaatccggcgataagaacagaacgtccatatccgatcgtgacagtacaggcttatgtagagcaggctgcgaaggatgggattattaacattagagagagtattgacgaatttacaacagatatccggatgatcgtgatcggaaatgtatttgaatggtgtctgagagaggggaatgctgatttcgagggcaacatgagtcgttctttaaggcggtatctggacagtacactggaggaaggttgatgatttatcactttattgtgaatccgcgggctcgttcagggcttggcgagatgctgtggaaacagctggaacctgagttgtgcagaaaaagaatcgattatcagattcatctgacaacaaagaaaaaggatgcagggaagattgcatcagagattacggaagatggccaggagcatatgtttgttgttcttggaggcgacggtacactcaatgaagtactaagcggaattaaatcactggagaaagtgacgttgggatatattccgattggatcaagcaatgattttgcaagaggaacaggaatcccgggagatccttttgaagcattggacacaattctttcacccaaaagggttgaaaagatggatataggtgtgctaaaaagggaagggaaaggaagaagatttgcagtgagtgccggtattggatttgatgctgcagtctgtcatgaagtatgtgtttcaaaatggaaacgtgtattgaaccttctgaaaatcggtaagctgagttatgcggttgtggcaatggatcgtattataaaggatcggccggtgaaacttgaactgacactggatgatggaagcatgaaagtgtttgagaggacttattttgcagcatttatgaatcttccttatgaaggaggaggctttaagttttgtccggacgcttccggaagtgatggatttcttgatattatggttgtgtcggatctgtcgaagctcaagattctgtgtctgcttccgaccgctttttcaggaaagcatacaagatttaaaggggtgacgatattaaaatgtcgtagtgttaaggtagtgacagatcgtgcactgccgttacatacagatggagaaccttcctttttatcaaaagagatagaagtctcactggaaaaagaaaaacttaatgtgatcgttgaatagaagaaaggtgatgaaacaggatgcatatagggattgttttagcaattgggttatgtattgtaataggaataccagctttcttaatttttttgctggctccaagactgtcgggcagaaaaagagtgcatccgtttcttggcgtaaagtgggcgcatagaggacttcatgataagaagcgtgggattccggaaaattcatttccggcatttcgtgcggcaatcgaagccggagatggaatagaactggatgttcatctgacaaaggatggacagttggtggtttttcatgatgatacatttgaaagaatctgtggaagacggggcagagtggaagatacttcatatgaagagatgcagaagtacagacttgcggagacaaaagagcggattccactattgtcagaagtactgcagttggtagatggaaaggtaccacttctgatcgaggtgaaacttcctaacacagatacaaagatttgcagaaaattggatgaagaactgcgaaaatatcatggcgaatacatgatccaatcctttaacagcctggtacttcgctggatgaagaaacatcggaatgaaatcccaagaggacaattatctgagaatctgacgaaaaacgacagaacaacgcattatctcttgagattttgtgtaaaatatcttttgagtaactgtatgtgcagaccggattttatttcttaccggtggtcggacagaaagaatccgggattatggctgaacagggttctctttaaaacgccggcagcggcatggacactgcatggagaaaaagatgttaaggcggcaagaagaagcttcgatatgtatatttttgagatgagttaaagaagagcaaatctgatttctattgaaagtgctgatttaaaaagtaaaggtgaacaaaagaagagacagatgttgataattcataagaaaaagaaaagaaatgttaaaaacttatgaagtcggttgagattgtgttttaaaagtgctataatcgagcctatcaaaaaagagcgttaaatgaaaatagcgcagaagtagcaagtgctgtatcggtttgatgaaaagcggaggagtgtcagatatgaaatggaagacaaagttcatagagacaatgaaaagatataagcatgcatgggtgtttttatacgcgttaatctatatgccgtggttttgttttcttgagaaacatgtgacgatgaattatcatgtggtgcagacagcattagatgaagagattccttttattgaatattttattgtaccgtatatgttatggtttgtatttattgcagctacatttttatactttttctttacagatgtacagggattttacaaactggcgaagatttcgtttgcaggaatgacaattttccttattatttgttccgtatttccgaatggtcaggatttacgaccggttgtgtttgagcgggataatatttttgtagatgcagttcgaatgctgtatcggacagatacttgtacgaatgtatttccaagtcttcatgtgtttaatactctgtgcgcatgtattgcaatccataagagtcaggcacttaagaaacacaaagctgtttgtattggagcatatgtgcttggagcgttgatcataatggcgactatgttcttgaagcagcattctgtacttgatgtgacaggagcatttattatggcttatctgttgtatcagtgggtatatgcagaagagacgaagaaagttccgggatattcaaagcgtccggtatttcagaataagtaagagttagaaaaagaattacaggaagtgcttttggctgatgaggtcaagggcacttttttgtatattaggaaagtcctttcctaatatacagaagtttctatagaaaagcatctggggaaatgttataataaaagccagtgaattactgtgggcagattagcctgacagttacgaataaagtattacatgagatttaggaggactagagcatgaagaaggttatgcttactggtgacagaccgacaggaagattacacgtaggacattatgtgggttccctgcgtcgtcgtgttgaattacagaatacaggagattttgatgacatttttattatgatcgcagatgcacaggcattgactgataatgctgataacccggaaaaggtacgtcagaatattatcgaagtagcattagactacatggcttgtggattggatccggagaagtctactctgtttatccagtcacaggtaccggaactgacagagttatcattctattacatgaatcttgtgacagtctcaagactgcagagaaatcctactgtaaagaatgagattaagatgagaaactttgaggcaagtatcccggttggattcttcacatatccgattagccaggcagcagatattacagcattcaaggctactgttgtaccggtaggagaagatcagcttccaatgcttgagcagacaaaggagattgtacacaaatttaattccgtttatggagatacactgatcgatccgaagattcttcttccggagaatgaagcatgccttcgtctcccgggaattgatggtaaggcgaagatgagtaagtctctgggcaactgtatttatctgtcagaggaatctgaagatattaagaagaaagtattcagcatgtttactgatccgaatcatatccgtgtggaagatccgggaagtctggaaggaaatactgtattcacatatctggatgcattctgtaaaccagagtattttgcggaattcctgccagaatatcagaatctggatgagctgaaagcacattatcagagaggtggacttggagatatgaaagtgaagagattcctgaacaatgttcttcaggcagaactggagccaatccgcaacagaagaaaagaacttcagaaagacattcctgcaatctacgagattcttaaaaagggaagcgagaaggcagaggctgttgcagcacagacattgaaagaagtaaaagatgctatgaagatcaattattttgatgataaggcactgattgaggcgcaggcagagagattttcaaaatagagtgttgttggaacagttagaatggaattttaaatgatatcaggacaggcggtgcagatttgagtttgcttacagtgaacttggatctggcaccgcctttgcttggtttggggtaaatttttgggcgtctgttcggagaggatcctttgaagtgagattttccaaagatacaaaaagactgtaaggaaatttccttacagtctctatagcgtgcgatagaagattcgaactcccggccttctgatccgtagtcagacgctctatccagctgagctaatcgcacattttgttgtttgctctgttgtatcgctcacaacaaaaaagattatataacggatattggaaaatgtcaacactaattttgaatttttttcaaaaaaatttgaagcggattttagaagctattttcaatctatcttttgtacgctaccgagtgttattcttcaataatctgaatctccagatagtcaaagtcaatctcatcgacaaaattgtcctgatagaaacgcgctttggcgtggcgcttgaactcattgatcgttgagtcgagccagatcggcttgctcagatcaaattcataacaaatcttgtcgagtgcatgaaagatcttatgtgtacgtgtgtcgtctgtctcatcgcagataacagtatcgcaaagcatgcggttgtctttaaattcttttccccataaacgaaacataatagactcctttccggcagcagaagaaactatctgatcttctgaaaatacctgtctcttgtatcctaacataagaaaaacaaaaagtcatttcttttttagagactttttggtatagtggaacggtaatgttactgttcactccagtgtcaatcactccgctgattgacacggaggatgcgtgttttgacttgaatgcatctcgccccatcgccaaaggcgatttaaaatggcgagatgcgttgctggtcgcacatcgtgtgaacagtaacacggtaatggtaacagcaatatagtaattgatagaatgattggagagcagttatgattagagaatgtacagagacagacagagaaatactgggaggttatctggaagaagacagttatggacaggcaatccttcatctgattgatgaatttggatttgaacagaaattccagtccgtttatatggatattgaagaagaacagtgcaaaggtgtttatcttatgatttacaaaaatgtactgctttattcgaaagagaaccaggtggaaattgatttcctggagcagatgctctctgtgcttgtgccggagatggtgattggacgaaaggataatgtgaatattgtaagctggcttctgacagactaccggatggataccgtagatcagatcccggagctttgtgatgaggaaggcaatgcgttgaagagggacacccggaagaaggaaggacaggaatggggcgtcctgtataaggaggactagaagagcgatgaagagaatatttattgacggactcagcggaatggcgcagggcttgtttgcaacattgatcataggaacaatcatccagcagattggaatgtttgttggaggaaattatggagatttaatttatttgatcgggaaagttgctgcagcgcttacaggagcaggtattggtgtcggagtggcaaggaagctggaggctcagcagcttgttacagtttgtgcagctgttgccggtatgatcggagcattcgcggggaaaattctggcaggtcaggtgcttgtagatgggaatattgtattagccggaccgggggaaccactgggagctttcgtggcagcttatgtggcaattgagattggaattttagttacaggaagaacaaaactagatattatcctgacaccattgatctgcattggtgttggtggagttgttggattgtttgtcggaccaccgatttcttcctttatgaactggctgggttctttgattaactggggaacagaacagcagccgttccttatgggaattgtagtttcggtcttgatgggaatgatcctgacattgccgatcagctccgcggctttgggggtaatcctgaatctgtcaggtcttgcagctggagcagctacagttggatgttgttgcaatatgattggatttgcagttgcaagctacagagagaataagattggtggatttttggcacagggaattggtacttctatgcttcaggtaccgaatattatgagacatccattgatttggatcccatccattttgtcaagtgcaattttaggaccggtaagtacaatgttactccatatgacgaataatgcaaccggatccggaatgggaacagccgggctggttggtccgttgatgacgtggcaggtgatgatccagacagaagatccgatgattgttctggtgaagatcattgtgatccagtttgtacttccggcagtgatcacacttggaatttcagaatttatgagaaagaagggctggattcgccagggagacatgaaactggagctgtaggcagaaaatggattacagagattggaaagatactattacagtaacactaaaatatctctaaaaaagaagtgaattctgtgacagaaaaaggggagtatgttatacttaatatatataaacagaccgggggatgactgctatgagaagtgaacaacaggtagaagctgcgctaaagagttatgaagatgttgacagctggaagacaatcattttcctgtataatgcagcgttgaaagaagttggtacaaagctggagattcttaatgatgaatttcagcatgtacatcagtataatccgattgaacatattaagacaaggatcaagacaccggatagtattgtgaaaaagctgaagaggtatggacatgagacgtccatagagaacatggttcgctatgtgaatgatattgcaggagtaagattgatctgttcatttacatcagacatatatcgtctggcagagatgataggaaaccaaagcgatttgaaagttctttcaattaaggattatattaagaatcccaaagaaagtggatataaaagttatcatatgttagtttctgtgccgatatttctttcggatagtgtagtagacacgaaggttgagattcagatccgaaccattgcaatggacttctgggcaagccttgaacataaaatctactacaaatttgaagggaatgcaccggagtatatcagcaaggatctgcaggaatgcgcaaagatggtatcagagctggatgataagatgctttcattgaatgaggcaattcaggaatgcattgcccaacaggataaggatcagattcggatgaatgaagaactgatgaatgatgtgtgcagagatgttcttggaaataacaaagaatataaagattcgaaagtacaggaaaaagtgacagagattgtaacataagacagtaatctgtagaaaatataaaactgtaataaacgaagtgagctgtggaaaatgagagattcatattttcacagctcttgttgttaaaagtgattgtgttactgtttacacgatgtgcgaccagaaacgcatctcgttatttcaaatcgcctttggcgatggggcttgatgattttctgtaggttcggtatactatagcaatagaagaatggaaaatatgaaagatatttagcatagaaagatgaggaaaatagatgatgataagaaaaaaactggcagtcttgatgttggctggtgtgacttgtttagcatccggctgtgggaatgtgatcaaggacggaacagaggcgcttggtgaaggaagatatgatgcggcagagacggcatttgaagaggcaactaagaatgagaataaagaagttgcggcagatggatatcagggacttgggatgacttattacgagcagaaagagtatgacaaggcattggaagcatttcagaccgcattggatcagggagcagagcagacgcaggaactttataatctgaccgcagtttgcgcaatgaagacggaagattatgcgaaggcactcgaatgtttccaggctggaatcgcacttgcagaaaacaagacaggagatgacaaaacgaaagcagatacagtacttcttcaagaaatggaatataatgtgattgtctgctacgaacaacaggcagactgggaaaatgcaaagagtgcgatgaaacagtatcaggcagatttcccggaagatgattctgtgagtaaggaagcagagttccttcagacaagataaaaaggttactgcggtcagtagcagggcaggttgcatattagcagatcatgataagtagataaggaaaagaaaatatgatatcaatggatgaaataaaagagagggtaattctcgttgcggtagatacggatggatctgatcaggcagaacgatccctggatgagcttggagagcttgcgaagacagcaggtgcagaagttgtcggccgtatgatccagccaagagaaaatatccatccgggaacttatataggaaaaggaaaaattctggaattaaaggaattattgtgggagacgcacggaacaggaattatctgtgatgacgagttgacaagtgtgcagatggggaatctggaagcagaactggattgtaaaatcatggacagaacacttctgattcttgatatatttgcagccagagcagtgtcaggagaaggtaagatccaggtagaattagcacagttaaagtaccgtgcttcaagactggccggacttgggaaatcactttccagacttggaggaggaatcggaacaagaggaccgggagagaaaaaactggagatggatcgccgtctgatcagagaacgtatcagcagactgaagaaagaattgaaagatgtagagcgccacagagaattgattcgtggacagagaaagcagtccggactgaaagtggcagcattagtaggttatacttcagcaggaaagagcagtattgagaatgcactgacacaggcaggagtattggaggatgcgatgcttttctcaacattggatacaacaacgagagctttgacactggataacacacaggaaattcttttgacagatacggttggatttatcaacaagctgccgcatcatttggtagaggcatttaagagcacactggaagaagcaaagtatgcggatattatcgtgcacgtagttgatgcttcgaatccacagatggatgcacagatgcatgtagtttatgagacactcagacagcttggagccgaaggaaaaccggtcattacactgtttaacaagcaagataaggttgagaatccggttaatcacaaagatcttcaggcagattattccattgcgacatctgcgaagaccgggcaggggctggaagagtttaaacaggcgttattggagattatccgtaaagagcagatttatattgaacgcttatatgatttcagtgaagcgggcaagattcagctgatccgcagtaaggggcagctgttatccgaagaatatgtgccggaaggaattgaggttaaggcatatgtgccgcaggatatttatgggagattataaatgcgccctgaattttaatgttatggaataagaaaatagataacaaaaccgtaagagaagcaggaaatgagcttcatcttacggttttgttcttataagaacagtgggaaaactgttcttggaattgcgtgtgatattatatggtgtttctgtaaagttatatcctactgcagatacggtgttgccgggctctctgggtaacttcccatggagacaagcagctgaagccctacatctcttgcggtgaggactgcattcttaacagcatccgcatcaccggttaccgcgacgatcacttcgttcgaatggcttgttccctggtccggggtcatatacttgatgacttcaaccggggaagacttcaccgcaaggtcagccatgacaagtccgatagcagcaggggaaccgcagaagaatccaaatggttttccaatcggagcgttgaatgccatatgaagtgctttgtctgcacaggcagagaaagtgaactccagatgtccggcctggctgatgtagagttcaccggcatatttgccgatatattcaagcgcaatgtcaactgcacggcgcacgtcagagacgttgtctccgccgatcacgatgaaacatccgtgtccgccccagccttttgtatcacgaggaagctcgatggaaacaatctctgtgttcgttgacttgacagcttcgtctgctgcattgatctgtccggctgcacctgtccttgaactgatcaggccaagacttttatatggctttttcagattcatcttctcaagaagagaagggtcaattcccgggataacaagtccgattgtatccaaaacggttgttccaacgaattcagtaagggaacaatcctgtgaaatctgttcaatgtgatgtacgtctatcatatgaatcctccatctattccaataatctgtccggtcatataagccggcgtatctgtgagctttaatgcaagctcggcaacttcctccggatcggcaaaacgtccgaaaggaatctcatccataagatcttggcgttcctcttcgttcaaacgaccattcatttctgtgtcaatcacaccgcaggcgattgcattcacctgaatattactcggtgcaagttccttggcaagtgctcgtgtcaatccgtgtattccagattttgttgcggaataagcaacttcacaggaagcaccgacagttccccacatagaagaaatattcagaatcttcccacattttttagataccatgtatggaatggctgcgcggctgcagtagaagacggaagaaagattcgtggcaagaatcttatcccagtcattgtcagtcatgtcagtcagaagtccgaaccaggcgataccggcattgttgatcagaatatcaacgccaccacactctttttcaataatctgaaaaatcttccggacttcgtcggggttactgacatctccgggaactgctgtacaggacccaccgtctgagagaatctcatgtgcgagttcttctaagcgttccatctggtggacacagttgagaaatacgtgataaccggccttggcgtatgctttcgcacaggcacgcccgatgccgcgggaagaaccggtgatcagtatggattttttattcataaaagaaaacctcagtctttctgagcccttaaataagcggctgatttggagagtgatcatgataaaattctaatgattactcagatacaataactataacataaaatggattggatttcattgtctttcgtaaatggatatgctaaaattttagaaaagggcgttactggatacagtaattaggatagatttgatgatttcggaagaaggagagaacacaatggcaaagacaaaggtaatctgttttacgaataataagggaggaagcggaaagaccacaacttgttcaaatgttggatttggcttgagagagcttgggaaaaaggttctgatgatcgacggagatatgcagctgaatctctccctttctttgtttgacgaagatacagtgcttgcatatgcacagagtgacaaaaatttgtatgaagcaatcaagcgacaggatgatctgactgattatatcgtgaatacaaaatacgaaggacttgatctgattccgtcttctacattgatgagttcgattgaatacgaactttttacaaaatggcagagagagtatattttgaaaaaaggattgaagaagatccgcgagtcagaggtttatgattatattctgatcgatgcaccgccgacacttggtggatgggtgatgaatatcctgtgtgcgtccgattatgtaatccttccggtagaggcatctccatggggactgtttggtcttggaaatatgtttgaattcctggacagtgtagaagaaattgcaccggatctcaagcttggtggaattgtgatcacaaaggttgatacaagaaagaattatttcaaacagacattagagactctgcaagagttagatgatgtgaaagtatttgatacttacatccgcgtggacagtggaattgagtggtcgcaggataataatgcaccggtgatcgcatataagaagagcagtagaagtgcgaaagagtacatggaattaacgagagagattgcagctacattaaaaggataaaccagaaaggcaggcaatagatgcatcaggaactgatccgggaactggcgatgatcacagatgaggaacgccggatccttgaaggaaaacaggaaatcgatccacagctttatacagaaaagaaggaaatggttgtggacagtgcgaaacttctgaagaaggggaagttgatccaggtcagaccgcatactcgctttgtacattttccggcgcatacacacaattatatagaagtaatttatatgtgccagggaacaacgacacatatcgtgaacggcaatcaggttgtgctcgaacagggtgaccttctgtttctgaatcagaatgcagtgcaggagatccttccggccggagagtatgatattgcagtgaactttattgtcctgccggagttttttaacacagcattctctatgatcggggcagaagaaaatcagctgaaagatttccttgtcggggcgttgtgtggaagagatgaagagacgtcttatctgtattttcatgtggctgatattctcccggtgcagaatctgatcgagaatatggtctggacgatcttctatgacatttccaataagcgaagcagtaatcagatcacgatgggacttttgtttcttcagttgttgaattatatggataagatggaagccggcggacgcaaatttgatacagagattatggcgaatgtgtatcgctatattgaggatcattttaaggaaggcacgctgtcagaactggcggtagagatgaaagtggatgtctattggctgagtcgtgagattaagaagaaatcagggaaaacatataaagaacttcttcaggaaaagaggatgcagcaggcagtgtatcttctgataaacagcaggattgcggtgtcggatattatagaagcagttggatacgacaatacaagctatttttatagaaaatttaaagaacgctacggaatcagtccgaaagaatatcggattgaaaacatgaattaaagataaagtatagagaggatgctatttttcacagatggcatcttctttttttacgcgaatagtaaaccgaagactatactgaagtgagagttggcaatttgcatcaataacaacgtatggaaacagataaaaataaaaaaacgacgaaataaaattgcgaaaataatatcaaaatagcactatgcacaaaaggagataggatgtataatgaaacatatgtgaaaaatacaaaaaggaggggcacgatgttagatatatcatattacgaaaaaacagatgagattattgcacagtatacatgtgaagaaaagtctttgatcccgattatacaggggattcaggaagaatatcgctatcttccaccggagcttttaacttatgttgcggagaaactgggaatctccgaggcgaaagcttacagtgtggcaagcttttatgaaaatttttcttttgaggcaaaaggaaaatatgtgataaaagtatgtgatggaacagcctgtcatgtgcgcaaatctattccgattctggaaggactttacaaggaactggggcttgggaaaaagaaacacacaacagatgaccagttgtttacagtagagacggtttcatgcttaggcgcatgcggactggcaccggccgtaatggtcaatgatgaagtacatccgaaaatgacacctgagaaaatgagcgagctgatcaagaagctgcgggaggaagaggaatgaggatagaaaacagaatgcagctccagttatggagagaagagtgtaaggaaaagcggcagaaagaaaactgctgtattctggtctgtggaggaacaggatgtctggcaggtggttcagataaaatatatgcccgtttgaaagaactaacttccaatatggatcatgtaacagtcaaaatcggtgaagaaatcgctcatgtgggacttaagatgagcggatgccatggattctgtgagatgggtccgctggttcgtattgaaccttataactatctgtatctgaaagtaaaactggaagactgcgaagaaatttttgaaaagacgattcttcatggagaaccggttacaagattgatgtatgaagataatggtcatgtatatcagacacaggaagaaattccattctatgccaagcagacccgtctggtgttgagaaactgcggtcatattgatgcagagcatattgaggatgcaatggcggtaggagcatatgagtctttcgaaaaagctgtgtttgaaatgactccggaagcagtgattaagacggttacagatgcaggtcttcgtggaagaggcggagcaggatttccggcgggaagaaaatggtcacaggtagcgagtcagccggaaaagatccgttatgtagtctgcaatggtgatgaaggagatccgggtgcatttatggatcgaagcgttatggaaggtgatcctcaccgaatgatcgaaggtatgatgctggcagcttatgcagtacaggcccaggaaggatatatttacgttcgtgcagagtatccgctggcagtacgaagactgcagatcgctatcgctcaggcggaagagaaaggacttttgggagagaatatccttggaacaggattcagcttcaaattacatatcaatcgcggagcaggtgcttttgtatgcggggaaggttccgcgcttacagcttcgatcgaaggcaagcgaggcatgccgagagtaaaaccaccgagaacagtagaacagggattatgggagaagccaaccgtattgaataacgtagagacttatgcaaatatcccgatgatcattaaaaacggagcagactggtacagccgtatcggtacaccgcaaagcccgggaacgaaagcgtttgcccttaccggaaatgtaaaaaataccggattgatcgaagtgcctatgggaataagtttacgtgaaatcatctttgatatcggaggcggtatcaaggacgataaagggttcaaggcagttcagatcggtggtccatccggtggatgtctggtagaatcccagcttgacagtaagatggattttgactcactgtcaaagatcggtgccatgatcggttccggtggacttgttgttatggatgaagacacctgtatggtagaggttgcaagattctttatgaacttcacacagagagaaagctgtggaaaatgcgttccgtgcagagaaggaactaagcgtatgcttgagattctggaacgtatagttgccggaaacggagaaatgagcgaccttgatgaactggaagaactggcagacatgattgaaaatactgccttatgtggtcttggaaagagtgcaccaaagccggttgtaagtacgattcatgcattccgaaaagaatatgaagagcacatagtagataagaaatgtcgtgcgggagtctgttctaatcttcgtgtgtttaagattgatccggagaaatgcaaaggatgttcgaaatgtgcgaagaactgtccggtaaatgcaatcacaggaaaaataaaatcaccatttacaattgataattcaaagtgcatcaagtgtggaagttgtatcgataactgcccatttggagctgtttatacagagtagggaggatagagatttatgggaattatgacaattgacggacaggccattgagttcacggatgaacctaatgtattgtctgtaataagaaaagccgggattgatatccctaccttgtgttatcattcggaattatctatctatggtgcctgccgattatgcacggtagaagatgacagagggaaaacatttgcttcatgttcagaaaagccgagagacggaatgattatttatacaaatacaccaaggctgatgcgctaccggaaactgatactggaactgcttctggctgctcactgcagagattgtacgacgtgtatcaagagcggcgagtgtcatctgcaggaactggcgcaccgtatgggagttcatgagatccgctttgaaaatgtaagagagatacagccaattgatacaagttcacacgcaattatcagagatccgaataaatgtatcctgtgtggtgactgtgtcagaatgtgtgataatgtacagaatatcaatgcaatcgacttcgcgtatcgtggaactgatgcacaggtaataccggcatttaataagaagattgcagaaacagactgcgtaggttgtggacagtgtcgtgttgtctgtccgaccggtgcaatcagtattcataccaatattgatgaagtgtgggaagctttggcagacaagaatacaaaggtgattgctcagatcgctccggctgtacgtgttgcaatcggtgataattttggttatgccaaaggcgaaaatgtaatgggtaagttagtaggagtactgcatcgtctgggatttgatgaagtatatgacacatcctatggcgcagacctgacagttgtggaggaatccaaagagtttattgagagatttacttccggtgagaagatgccactctttacatcctgttgtccggcatgggtaaaatattgtgagaataaatatccggaattcgtgccgaatctttcaacatgcagatcaccgcagcagatgtttggagcagttgtaagagagtattataaagatcctgagaaaaatgaaggaaagaagatcgtatctgtatcaattatgccttgtacggcgaagaaggaagaaattttacgtccggaatcttatacaaatggcaggcaggatgttgattacgtgcttacaacaacagaaatcgtaagaatgatccgcaaatcaggaattgtatttgacaaagttgagatcgaagcagctgatgtaccgtttggtatcggctccggaagtggtgtgatcttcggtgttaccggtggtgttacagaggcagtgctccgtaggctgcagcagggacacaacagagtagacatggagtctattaaaaagagcggtgtgcgtggggacgacggtattaaagtgctgacttataattataatggaagagagattaaggcagcagttgtaaatggccttgcaaatgcagataaagtattgcagcagattaaaaatcacgaagcagagtatgattttgtggaagtgatggcttgccgcagaggatgtatcatgggtggaggtcagccggtgaatgcaggaccgagaaccagaaaagcaagaatgaagggcttatatgatacagatgtaaacactcagatcaagaaatcaaatgagaacccaatgattctttccttgtacgatactttgttgaagggaaaagagcatgagcttcttcatagaaatttctcaggtaaataaagtatctggttgtggagaattacatttgaaatgaagatatacattttcaacaaaaatagtaattgaaaattgtacaaagtacaaaagagaaccctaaaaacaaaatataatgcaaataaggacgctgtttttcgtaaatagcgtcctttttttacatagaaagcgtggatataataaagccataagaaatgaacagtaatagaaaaataataaggaggcaccaaaacaatgggcaattattatctggcagttgatatcggagcatccagtggacgccatatgctggcatctatggaagatggaaagatgaaactggaagaagtttaccgttttccaaatggaatggataacaaaaacggtactttatgctgggatgtagatcgtctttttacagaaattaagaacggattgaagaaatgtaaagagcttggaaagataccggcaacaatgggaattgatacttggggagttgactatgtgcttcttgatgagaaggatcagatcctcggagatacagtaggctatcgtgacagtcgtacgaatggaatggatgagaaagtgtatgaaaagatttccctttccgcattgtatgagagaacaggtatccagaagcagatattcaatacaatctatcagctgatggctgtaaaagagactcatcctgagtatcttgagcaggcgaaagcaatcctgatgatcccggattacttccatttcctgctgacaggtgtgaagaaaaatgaatatacaaatgcgacaacaggacagcttgtgaatccgacgacaaatgactgggattatgaactgatcgatatgctcggatacaacaaagagatgttccagccggtatctatgccgggaacagtagtaggcgaatttacacaggacattcagaacgaggttggattcaactgtaaggttgttcttccagccactcatgatacaggctcagcggtacttgcggtaccaaccaacgatgacaatgccatttatatcagctccggcacatggtctttgatgggaattgagagaaaagaagcagactgctcactgagaagtatgcaggcaaacttcacaaacgaaggtggatacgatcaccgtttccgttacctgaaaaatatcatgggactctggatgatccagtctgtaaagaaagaattcacagaggatctttcttttgcagagatttgtgagagagcttccaaagagacgatcacatctttagtagactgtaatgatgactgcttccttgctccgaagagcatgattgaagctgtgaagaagttctgccgtgattccaagcagcaggtgcctgaaacagtgggtgagattgcagcagttatctacaacagtcttgcaaaatgttatggcgatacgatcgaagagattgaagcattaacaggaaaaaaatacactacaatctatgttgtcggtggcggtgccaatgcaggatatcttaacgaactgacagcaaaatatacaggaaaaaaagtttccgcagggccttctgaagctacagcaatcggaaatattgttgtccagatgctacatgatggagtatttaaagacctgccggaagcgagaacgtgtgttggaaaatcgtttgatgtaaaaatatacgaaaatgcgtaattcaaattcacaaaaatggaggaagaaaagatgacaagatatgaatcagccaaagaaatctatgcaaaattaggagtggacacagacgcagcaatcgcaaaatgtaaagaaattccggtttctcttcactgctggcagggagatgatgtaacaggatttgaccacgacggccctctgacaggaggaatccagacaacaggaaactatccgggaaaagcaagaactccggaagaactgttagctgatatggataaggcaatgagcctgatgccgggtaaaaagaaaatcaatgttcatgcatgctacgcaatctttgaagatggtgaattcgtagatcgtgataaattagagccaaaacatttccagaaatgggttgattttgcaaaagaaagaggaatgggacttgattttaatccaacattcttctcacatccaatggtaaaagacggacttacactttcaagcccggatgaggaagtaagaaacttctggatcgagcatggaaaagcctgcatccgcatttcacagtattttgcggagcagacaggagttccttgtgtaatgaatatctggacaggtgacggattcaaagatattccggctgaccgtatgggacctcgtgtacgctacaaagagtctatcgatgcaatcctttccgagccatttgacacaaaccttgtaaaaccttgtgtagagtctaaggtattcggtatcggtgttgaggcttatacagtagggtcagctgaattctcactgagctacgctgcaatgaacaaagacaaatgtctgccactgatggacaacggacattatcatccaacagaagtagtatccgataagattccggcactgcttacattcttcccggagattgctctgcatgttacacgtccgatccgttgggattcagaccatgtagttctctttgatgatgagacaaaagagatcgcaaaagagatcgttcgctgcgagaacggaattgaccgtacatatattgcactggattactttgatgcttccatcaaccgtatctccgcatgggtaacaggattccgcagcttccagaaagcactgcttgatgcactttgtcagccaagcgagatgctcaaagagcttcaggatacaaaccagatgagcaagaagatggttgttatggaacagtgcaagacacttccaatcggtgatgtatgggaagagtactgccgtcagtgtggtgtagaagctgaaggatggtttgacgagattcaaaaatatgaggatgaagtgctgtctaagagagcataaaaaattgcaatatcgtacctgatgcagagtgttgaactgctaaaaaggatatagtttatgtgagaaagagactcccggaattggtggaaaatcaattccgggaattttttatatatagaataatagagaaaagtgttttattatgggcgttgcacaatacgcaacatgcgatgaaaaagtatgctgaagaagatagacaatgctttttgacaagattaaaatatactcagaagatatattaaaaatgtggtgttttatatcgaaatatacagaaatagttatgatagaggattttctgtataaaagaaaggggcaatgtaatatggtacagtcattagcgagaggaatagaaattttgtcgatcattcaggaaaagggaagtacaacagcggtagagattgcgacagaacttgatgttgataagagtacggtttcgagattgatttcaacattgatgcagtacgatatgattagcatagatcctattagaaagaagtacagacttggatttcgcctgttatatcttagtgaaggtgtaaaacggaattttaatattgcgatgatcgcccggccgtatctgtataaaatctgtgatgagacgaaagaaagtgtacatcttgcagtaatgggaaataaaaaaatgtatattgcagatcaagtgagaagccagagggaatataatctgtcagcacaaattgggatgattgaagcatggcactgtagttctgtaggaaaatgtgttttggcatataagccacagtctttcattgagaatttgttttctgattatgattttgaaaaatatacgacacatacaattgataatttccaggagttggaaatggaattaaaaaagattaaagaacagggatatgcaattgatgatgaagaacggacattgggagtaaggtgtatggcagttccaatctttaattatggaggaaatgtgagttactgtattggaatttcagcaccaaaggaacagattacagaaaaaacgaagaaacaatatatttcctgtatgaaaaaatatgctcgtcagatcagtaatgagttaggttatggattatatcataaggtatgagaatacaagtcttggatcaataaatagtgttggttcgagactttttatatattaggaaagaactttcctatttataccttgaaattatgcaaaaacactaaaaacaaggaaaaaacatgggaaatatatataaaatgcacatggttgtataatgcgcaaccaggaattaggttttatttcccaatctatttttcctatgctagaatgacatcaagtaaagaaaaagagtaaatgcctggcaggaaaatagaaggagggaagaaaaagagtacaaaatgtttaggtcctgataacataaagtcagaaaaagtattgaggaatagctatgaaggaaatgattgaacaaagaagaaaaagagcgaaagcgataaaggaatatggaacgcttagaaaagcagttgaagcaggagcacttgagcagtttcaggatgtcagtcttagcgaagcagtggttttaggtctggtgaatcaagaggttcggacttttgttggaatctttggacatggaatgacagatgtaggtgaagcgcttcgtatttatgaagaggaagacgttataaaaacatataatgtccgaaacgaggtagaagcatctcatattgcttccatgctccgttggaaatacaatcaggtgtcagcagtatttacatcgattggaccaggaggaatgcaggcgaccgcaggatcacttgttccactggcaaatggactaggtatctattatctgatgggggatgagacaagtcagagcgaaggcccgaatatgcagcagattccaagaagagaacaggaattattcttgaaagtattgtctacactgggaccggcatattcacttcatactccagaagcaatatttacagctttgaagcgcggagatgcaacagtgaatggaaaagaaaaaagatccccattctatatgcttcttccaatgaatatccaaccgaaggttatgatagggtgtaaccttttggaattcccagaaaaatcaccggaatcaaaggtgatcagtattgatcaggaaacctacaacgaagcggtgaatgcaatttgttctgcttcaagaattacagtaaaaacaggaggcggcgctgccaatattgatggaaaagtattagaagaattccttgaactgactgatgcagcttatgtgcatggaccacaagtcccaggaatttatccatattctaaagaacggaatatgagtgtgggaggttctaagggatcaatttgtggaaattatgcgatgaatgaatgtgatcttatcattgcattgggagcaagaggggtatgccagtgggattgttcaggaacggcttttcgaaaagcaaagaaaatgatcaatatcaactgcgattatgatgatcttggtcaatataataattcggtgagaatccagggtgatgcgcaggaagttctgataaaacttaacgagttactaagaggaagaaacctgaattccgatccagagtggattaaagggtgtgttcagaagaaagaagagtgggaagcttacaaaaagcttagatatgatcagccggtccttgaagatccaaaacgaaagaagaagattcttacagaaccggcagcaatcaaaattgcatgtgatttcgcagcagaacacgagtgtattaagatctttgatgcaggtgatgtacaggcgaacggtttccagattgtgacagatgaaaaaccagggtataccatttcggatagcggatcttcctatatgggatttgcagtttcttctacacttgcctttgcgatagcaggcaataaggattatccgatggcgttcacaggagatggaagctttatgatgaatccacagattctaattgatgcagtgcagcatggattaaagggaatgatcctcttgttcgataaccggagaatgggagcaattactagtctacaaaacgcacaatatagtatagaatataaaacggacgatcaggttgtagttgattatgtgcagatggctgaagcagtacagggagtaaaaggattctacagcggagaaacaccggaggaaatgaaagaagcgttagcgaaagcatataagtatgacggtctgtcactaattcatattccagtacattatggagatgatgaattatccggtctcggaacatttggagactggaatgtcggaaactggtgtgaacgtgtgcagaaaatgaagcatgagattggtttttaattaagaatgtacaggcggaaggcctgaaagataaaggaggataacatatgaattacgagattcctgagaagatgaaggcgtgggtactgggaaatccaggagaactgacacttgaggaaaaaccagttccggaaccgaagagagcagaggttttgatccatgtggatgctgttgcaatctgtgcaacagatttggagattattaagaacggtccaccagcactgatccagggaggacttccatttaataagggatttactccgggacatgaatatatgggaactattgtgaagcttggacctggagttgatgagtataaagttggtgatcgtgttgcggttgagattcatgccggatgcgacagttgtgaaagatgtcgcgaaggaatgtatacttcttgtctgaattatggacagaactatgaagggcatgataaggggcacagagcaaatggattcacaacagacggtggatttgcagaatatgtaatcaatagcgtaaaaacattatgccatgtaggagacaatgttacagatgaagaggcaacattgatcgtaacagcagggacagcaatgtatggtttggatacgctcggcggattgtttgcgggacagtcactggttgtgacaggacctggaccgatcggacttatggcagtagcagttgccaaaacacttggagctaatcctgtaatccttacaggaacaagagacaatcgtctggaacttggtaagaaattgggcgcagattacacgattaatgtaagaaatgaaaatgttgttgagaaggtaaaagaactaaccaatggcgaaggcgtacattatgtaatggaatgttcaggagcaccaaatgcagtaaatgaggcggcagcaatggtaaaacgtggcggtaaagtgtgtttggcagcgtttccgtccaaaccagtagaagttgatgttgcagcacttgtaagaaacaacatttctctgtttggaatcagaggagaaggaagaagcgcagtacacagagcagcgtcactgatcagtgagaagagatttgatgcatcactgatccatacacatacattcaaatttgatgagctacttacagcattgaaatattcaagagagagaattgacgatgcaattaaagttgtagttaagattccaggttaaaaaagcaggagagtaatcgtatgattcagtacaaaaaatattacatgcccggtacaaaagaagagcttttgaaaacaatcgatacgatagattgtacttatgatattctcgctgggggaacggacctttatgcaaaagaaaaaactcctttcaatggagcggatgcagcgatagatatcagcggaataaaagagttttctgtcattaaattgaaaaaagaagagggattgataacctttgggtccaatatttgtattcagcagttcctggaagagaaggtgctgatggagaatgtaccgattctgcgacatgcagcgatttatttcgcggatcagcagatcagagagatggcaactgtcggaggtaatgtggcaaattcctcgccttccggagatacgattgctccgctgacagcgttggaggcggtgattcatacgattacttcaaaagataataaaatatgtgaaaaagagacaccaattacggaatttattaccggtgtgggaaagaatttacttgaaaagggagaagtgatctcttcaatcacttgtccggttttaaaagaatatggatgtgcattcaagaaagttggactgagacgttccctgtgtatttcaacagccagttctgcattccttgttaaagcagatgcatcgaagacacattttgaagatgtgagaattgctttcggtgcaatcgggccggtgccaagaagaatgatggagattgaagacagactgaaaggtgaagttatttcaaaaggactgatccagaagatggaagaatatattccggaagatgtggtacggtctcgaagcaggaaagaatacagaagaaatgtagttaagaattttacgctggcaggaatatatgaagcattggcagagattgggattatcccacaatagtaacaaaggcacaaatcttaagaggttttaaaagagtggattatggagatggaacgagtaaaaattgaattgacagtaaatggaagaaaggtatgtaagtatgttgctccggcgatgagactggccgattttctaagagaggaactccatttaataggaaccaaaaaaggatgtaatgccggagaatgtggtacctgttctgtattgatcgacggtgtacttaagaaaagctgtctgataccggtcatgaaagcaaatcacagagaaatcgtgacgattgaaggaattgggaaggctggtcttagtattatccagagatgctttctgaaggtgggggctgtccaatgtggatattgcacaccgggaatgattatggcagctacgacaatattgaaagaaaacagacatccggacaaagtggagatcagaagaagactcggtggaaatatctgccggtgcactggatatgcgaagattattgaagcaatcgagcttgccagggatattctcaatcatgaaattagtgaagagtgcttggaagtaattcccccatctacagggaaaacaataggatcctgtgtagaaagggtggatgcaagaggcaaaatgacaggggcattagagtacgcagctgatatggaaatgccaagaatgcttcatattcatcttgtcagaagtaaggaagttcacgccgaaattttgaaaattgattatgaaaaagcattggaaatgccaggtgttgaaacagtaattactagtgaagatgtgccgggagaagatagattcggcgtatattatcatgaccagccagtattggcgaaaggaaaaatccgtttttatggcgaaccagttgtggcaattgtggcagagacacttgaagatgcagaagaagcagaaaagggtgtagagattacatataagaagctgccggttgtatccaatatacaggaagcaatcgagtgtaaagctgttttacatgaggatcatccggataatattgtatctacaacttgtgtacaaaaaggcaatgtggaagaaggatttaaaagcagtgaaattattatagaaaaagatttttctactcaggcagttgaccacgcatatcttgagacagaagcgggaatttcatactgtgatcctaatggcacgatagttgttaaatcatgtgatcaggatattacccatcatcgagtactgcttgcaaagatccttggaatgccgattaataaagtaagggtgattatgtctccggtaggaggaggatttggtggaaaagaggatatgatctatcaggcgattcttgcaattgcaacactgaagacaaatcagccggtaaaacttgttttctcaagagaggattccatgataggaagctgtaagagacatccggttacaatgcattataaaattggtctgaagtccgatggaaagattcaggcggttaaggcagaaatcaggtctgacggaggggcatactgcttctcaaccaaaggaaccgttgcgaaatctgcaatttgcggagcaggaccatatcagattgagaatgtcaaagtaacggcgacgggctattatacgaacaatactccatcaggtgcaatgcgtacctttggagtgcttcaaccaacttttgcaattgaatcgttgatggacatctgttcagagaaacttgggattgatcctatagaacttcgcatgattaacggaatgaaagacggcgcggtaacacatacacggcaggtacttggtaaagtagcttatacagagacactgaaaaagtgttctgagattgctggatgggaagttggatcatcaagagtaagggggtcggtaagaaaagatataaagggaagtcagattgcagaaccttatattcctggaaaggaatttaagtcagaagaggcaatgaaactttgtagagataggtttaaatacggacgtggtgttggaacaggttggtatgggattggaagatgtgcaacaatagataaagcaggtgcatttgtcgagattgatgacggaggtacagcgatgatcctgaccggagtaagtgaaataggagaaggaattctgacagtcctgacacagatcgccgcagacgaattgggaatgtatccggaggatattacgattggagataatgatacggcacgagttccagaagcggcacatgtcggtgcaagccggcagacttatatgattggaaatgcagtatgcaatgcatgcagagacgtaaagaaaaaatttattcgtgaaatggctgcttattggaatatagatagctcttcaatatgtatgaagaacagaagaatctatgtggaaggaaatgcacaatataatttgtcactgaaagaagcagtcgatatatgtaagaaaataagaggtattgttccgttgggctctggaacatataccgcacaccatgaaggactggatccggttgatggaagaggaaatccatggcaggcttatgtgttcggaacgcagattgcagaggttgcagttgatacttttaccggggaagtccatgttcttggaatttgggcagcgcatgatgtgggaagagtaattaatccgcgaggggttgaaggtcagatcgaaggaggagctgtacagagtatgggacagacaattatggagaactatgtgttgtcagagggagtcccgacaaataagaattttgccaagtacattctgccgaccagtgtagatgttccggagattcattcttacctggtagaagaaagagacccattcagtccagtgggcgcaaaaggaatcggggaacctgctccgttgccgacagcacccgcaattgtgaatgcaatttatgacgcagttggtgtccggattacttcacttccggcgataccggagaaaatattaaatgagatatcgaaaatgaaaaattaaaaaacgtcagatacatgttatatcataatgtatcttccaagaaaaggagaagagaattatgagtagtacgagaaatacagttggtttatcagtaaatcaaaagaaatggatctatatagcgatcagttttgcggtaatgatgattattaagaatgtgacattcccatcatcgattacaacaatcaatggagcagaacttacagcgacaggacaggaagcattatccgttctggttctggcattgctgttatggatcacggaggcaattccattccactttacaggaatccttgcaatggcacttctgtcagtatttggagtaaattcatttgctaatattgtaaaggtaggatttggaaatattaacgttatcttctttattggtgtatttattttaagtgcatttattaataaatcgggactaggaaagcgactggttaatatctgtctttcaattaccggtaacagcacgaagtttattttacttggttttattgttacaggagttattctttccatgtggatttccaatatggcggttgcggcaatgttaatgccactggcgaaatcacttctggatgaagaaggcgtagaaccactgaaaagcaattttggtaaagcgcttatgatgtctgtagcatggggaagtctgatcggtggatttgggactccggcaggaaacggaccaaacccactggctattggatttatgaaagatatggcaggcgttgacgtgtctttccttgactggatgaaatatggtgttccaatctctattatcctgatcccagtagcatggggacttttaatgttggtgttcaagccagaaatgacccatttgaaaaaatcaaatgaagaaatcagaaaagaatttaaaaatcagccgaaactcagcagagatgaaattgtaacattgattatctttattgtaacagtgctgacatggatcttctcggcacagttaaagaaactgcttggaattgatcttccaatcgcattaccgattgcatttacttctatgctgttcttcttcccgggagttagtacgattaagtataaagagattgaaaaatctatgtcatggagcagtatcattcttgttctttcaggtgtatcacttggaatggttctgtatgattcgggcgttgcaaactggattgcattaggattgttaggacgtatcgaaaatttaagtccgattcttatggtatttgttgttgtgcttagtgtatctattatgaatattactctttcaagcgcaacggtatcagcaagtattgttataccaattattatcggactagcaatgaacattggtgtgcatacgatggcacttgcatttccagcagcattggcatcttcactggcgttcattttgattacatcaacgccaacaaatgttattgcctattcagcgggatacttttcaatcaaggattttgctaaagtcggagttattatgactgtgttttcctgtatcgttgtagcagtcgtaatgtacggcgttggtttgatgacaggattgtattaggaggaaagaaaggaaaaggaatcatatcgtatggtatggttctttttttggttgcataaacctggcaaactgcatccgtgcttgcacgagatgcaatttgctaggtgtaagtgcagtaagatcatcgagcattaggtgagagaattaagtataacagcgagtaggcatcagttagttcaagcgaaaaaagctaattcgactggtgttgcacaatgcgcaatcagggagggggaaatcattgcaggtagagggattaaatatataatttaaattagtagaaaaaggattggaatccaatcagaatcaattcacgatcaaaggaggaattaacatgaaaattgcagtgatcaatgaagtaagtgcttcgcttagaaatgaggatattatgaaagcattgcataagacaacagacgcagagattctgaatgtaggaatgaagactccggagcagatgccttctcttacttacatccataccagttatatggcagcaattcttctgaatacaggaagttgtgattttgttgttggtggatgtggaactggtcagggcttcttaaatggtgtgttacagtttccggggattgtgtgtggactgatcgtggaaccgcttgatggatggctgttttcccagatcaatggaggaaactgtgtatcacttccgctgaacaagggatatggctgggcagcgaatgtgaatctggagtatacatttgagaagcttttcaaagatccggctggggcaggatatccgagagagagagctgagagtcaggggcagagccgtaaaaagctggcagagatctctaagatgacacacaaggacctgacacaaattctgttagatacagattcagagatcttgaaagcaattgccggaacagacagttttatggaagttttggaacatggcggagatggtgcgaaagatgtattagagtacttaaaacagtttagataatattttgctgtgttgctttgagctttgagtagaaatggaggaaagaatcagtatggataaatttatagaaaaatttagtctggaaggaaaaaaagcaattgtaacaggaggagcaaaaggtctatgcaatggaatggcacaagcgttgcatgatgcgggagcagaggtggttcttttggatattctggatattgtggaggattctgcgaaggaaatggcaaaggaaggagcaatggttcatgcagtaaaaggagatttgtcagacacggaatcgttggaatctgtttataatcagtgtttagaaaaacttggaggacgtgtagatattcttctgaatggagccggaattcagtatcgtgcgcctgctgttgactttccacatgaccgctgggaaaaaatagtagcaattaatatgaatgcagtattctacttatcacaacttgcaggcaaaaccatgattgaacagaaatatggaaaaattatcaatatagcttcgatgacagcgttttttgcaagtgtccttattccggcatatagtgcaagtaagggtggcgttgcacagattaccaaagcattgtccaacgaatggtccagtcatggcgtgaatgtaaatgctattgcgcctggatatatggcaacagagcttacagctaatatgaaagaggtgaatccgaagcagtatgaggagattacaggaagaattcctatggggcgttggggaaatccagaagatctccagggacttgttgtatttctggcatctgatgcatcagcgtatatctcaggtgctgtaatcccagtagatggcggatttatgggtaaatagcagagaatttgcagaaacaggaaaacgaaaagaagacttttcaacaagaatatgaagaaagagattaatagataaatcggaagagaggatatgaacatgagactggaaaataaagtagcaattgttacaggagcaggaagaggacttggtcgtggaatcgcattgaagcttgcaacagaaggagcaaaggtggttgtagcagacatggcaccggcagatgagactgtggcactgattgaaaaatctggtggaatagcaagtgcatttactgtaaatgtttctagacaggaagaagtacaagcgatggtcaagtatgcgattgatacatatggaacattggacattatggttaataatgccggaattaaccgggacggaatgcttcacaagatgccagtagaaaactggcagcttgtaattgatgtagatttgacaggtgcgttctttggaacgcaggaagcgatcaagtacatgagacaaaaaggatacgggcgtgtaatcaacatctcttctggtagctggttgggaaatataggacaggcaaactatgcagcagcaaaagctggtgttgtaggacttacaaagactgcagcaagagaaaatgcaagaaaaggaatcacctgtaatgcaatttgtccgggatttattgagacagatatgaccttgaaattgaaagaagtaaatgacggagcagcctgggaaagtatgatgcagagaatcccgatgggctatgcaggaaaagcagcagatgttggcaatatggttgcatttcttgcatctgatgaagcttcttacattacatctgaagtgatcaatgtaggtggaggtatgattgtgtaaagaggtaagaatgaggtgatatacagttatggtaaaaggaaaagatgtgtggggaacgtggcttcagagagacatggaagaacgacaaatcgggaatcgtactgtttataccttctcaaaaatgaagaacagtttttacgaaatgttgtgtgatacagcaacaaaatatccggataagataggaattgtagacaactggaatcgtgagtatacatatcagaagttcttggaaatggttaaccaactggcagcttatatgaaacatatactgaaggtggaaaaaggaaatcatattggacttcttttaaataatggaattgagtttgccactgcaatttatgcagtgtgcaagcttggtgcagtggcagttccgcttcctacgaaatatcgtgaaccagagatacagtctcttgtgaaaaaagcagatttaaaatttatattcgttagtgaagattataaggtatggacatcattctatacagaatgtgggataaaagttatcctgaccgaaaatgagaaaacagaatatggatttacgtatctggcaatgcagaaagaaaaagaggaatctggagaaggagagctggaggatgaagtgattctgatgtttacgtcaggaactacgtcaactagtaagggagtcattttgaaaaattataacataaatcatgcagttatgatatatcagcgaatccttgaactcggagaagatgatcggacaatcattccagttccaatttatcatattactggtttagttgcacttctaggcttatttgtatatattggtggaacggtttatctgcataaaaggtatgatgcttataggattttaagtgctatacaagaacatgagataacatttttgcatggttcaccgactgtatttggacttcttttagaactgaaaaataaattttctaagaatgaaagtattcgtgtgttggcttgtggtagcagttatatgccggtagagacgatgatgaaattacatcaatggatgccacagatgacgtttcatcgaatatatggaatgacagaaacatcatctccggcaacaatttttccatctgatgcagctacaagtatttatgcaaaagcacagggaaaaccaataccaggtatggaactcaagattgttgatgattctggaaaagaagtgccatgtaaagaaattggaaatgtacagttaaagggtactaacatatgcgagtcttattatcatatagaaaaatcacctatcgataaagaaggatggcttgatacaggggatatgggatatctgaatgaagactcttatctgtatattgttgacagaaagaaagatatgattaatcgtggtggtgaaaaaatatggtgcaatgatgttgaaaatgaaattacatcattaaaaggggtaaaagaatctgcactggtaggaattccaagtgaaaaatatggggaagtagcagcagctgttgttgtgttggaaaaagaaagcaagttaacagaagaagatatcaaacaaaaattacatgacagaattgcaaaatacatgatcccagaaaagatactgtttttagagaaaattccaaaaaccccaggattaaaaactgataaaagagcaatcagagcactgttttttccagaataaaaagtaaaggagcagagaggaacatgctgaaagcaaattttattacagcagatgaagctgcacgaaaagtgaaagacggagatactgtatgtagtattgcgatgacacttgtaagtgttagtgaatctattttgaaagcgttggaaaaacgttttttggaaagcggacatccctctaatcttaccttgcttcattcttgcggacagagtgatagaaaagatggaatccagcactttgcacatgaaggcatggtgacgagaattataggatctcattggggattacaaccacgttggatggatatgatagcaaaaaatcaggtagatgcatattgtctgccgcagggacaaattgcacaattatatcatagtatggcatgtggtcttccgggaaaaatggcaaaagtgggactgggcacatttattgatccacgtattgaaggtggaaagatgaatgagcgaaccaaaaggcttccagatattgttgatattattaaatacaaagatgaagagtatatgttttataatcagattccgattgatgtatgcattatacgaggtacggagtgcgatgagatgggaaatctgacaacaacagaagaagcaatgaagctagaagtacttccggctgttatggctgctaagcgatacgggggaagagtaattgcacaggtaaaacgtgtggttcagacaggaagcttaaacccaaaagaagtaacggttccaggagtttttattgatgatattgtggtctgcgaaaatcctttggaggaacatcgtcagacatcatcttggtattttgatccatcttattgtgggcaggcaagagtaccacaagaaaatattccagcagcgtcttttaatgaaagaaaatttattgcgcgtagaggtgcaatggaattgtatcatggagcagttgttaatcttggaacaggaattccaaatgatatggtaggaagagtctgcaatgaggaaggcatatcagatgacattatgattactgtagaatcaggaatctatggaggtgttcaggcaggaggcattgattttggaattggtcagaatctttatgcgatgattggacatcatgagcagatggattattataatggggctggtgtggatattacatatatgggaattggtgaactaggagaggacggaagtgtcaattcaacaaaaatgggagttcgatgtacaggtgccggtggatttattgatattacacaaaatgctaagaaagtagttttccttggaacatttacagctggtggagcaaaatacaagtttgaaaatagaaaacttgaaattcttcaagaaggaaaaatacgaaaaatggtgcggcaggttgcacaattatcttttaatggaccaatggcgagaaaaaaaggacaggaagtcatggttgtaacagaacgtgcagtatttcaattggtaaaagatggtgttgagttgatagagattgccccgggaatcgatctacagacacagatacttgataaaatggattttaagccaattataagtaagaatctgcgcgtaatggacgaaagattatttgttcaggatggaccttttggacttaaattgaaagaaaaataaaagacttataagattgtgaaaatagaagaaggagaaaattcatgaaagatgtagtaattgtaagcggcgtgagacttccagttggaagttatggtggaagtttgaaagatatcacagcaatagacatgggagcaatggtggtaaaagaagcagttaaaagggcgggaatccagccatcagatgttgatgaggttgtaattggacaagttggagaagttgcagaaaatggatttattgcaagagcagtaagcttaaaggctggaatgccgaaagaaacaaccgcttattctgtaaaccgtcagtgtggctcagggcttcagtccattgcagaagctgtgatggagattcagacaggacaggcggacgttgttgttgctggtggtacagagaatatttcaagacttccgtattatgtaaacgatgcacgatggggagcaagaatgggtcacaaagtatttgaggatggagttattgacattcttacatggccgttggatggaaatcataatggtgtgacggcagaaaatgtagcaaaaaaatatcatgtaacaagagaagagcaggatgcgttcgcagtacgtagtcatcagagagcatgcaaagcaattaaagaaggcaagttcaaagatgagattcttccggtagaattgaaagatcgtaagggaaatgtaacgatttttgatacagatgagggaccaagagaaggacagagtatggaaaaacttgcaaaacttcgtccatgttttgtaaaaggaggtacagtaacagcggcaaattcttccagcttaaatgatggcgctgcagcagttgttgtaatgtctaaagaaaaagcagaagaacttggggtgacaccaaaagtaaagatagaaggatatgcaattgccggatttgatgcggaactaatgggatattcaccgaaaatctccagcgagaaacttgctgataaacttggattagatcttaaatccattgatatgtttgaaatcaatgaagcatttgcgagtcaggcgtatgcggtgagccgtgatcttggacttgatcctgaaaaggttaatatttatggtggcggaatctccatcggacatccaatcggagcaacaggcgcaatgcttactgtaaaagtaatgtatgagttaatgagaacagataaaaaagatgcaatgattagcatgtgtattggtggaggacagggaatctctatgtactttacaaaatgcgaagcataatttgatgtataaaaagtccgtctatgtattaattatcaatgttcatagacggacttttgaatttatagaaataataccatcctgaaagatgaaaatatcagaatggtaaaaaggaagttatctgatgaaatttgttgcaatgggttcctcacgttgaggaagtggaatgccgttggattttccagcttcaatacattttaaaagccaactcatgttaagagcaagtgtgcgcatggtttgaagtccttcgagatctttttctatgtctgttggtttcaagccgtgaacctgattccaatattgagatggaacaattggcatattacacattgcaaaatacatgttcatctgggagaaggcttcagaagcacctcctctgcgacaggaaacaactgcggcagctggtttgttttcaagataagaacttccactgaagaaaagacgatccataaaagaagaaagagaaccagtggaagatccataataaacagcggatccaaatacgaatccatcagtatcctttgctttttctaaaaatatctttaaaatatcatcaaatacacaggttccgctttcttgacattgacagcatccgatacatccttggacagtgcttccaatccaaaaaatttcagaatcaattgcttctttttttaattgcatctgaatttcttgtaaagcacggtgtgtacagccatttttatgtggggatccatttactaataatactttcatgttattgagcctccttgcttaaagcataatattgaacgatctgccttacattataaacgtagcaaaggagtatggaataatcaagaaagaaaaactattagttgcataatgcgcaacaataaattaaaagattgaaagaaacagtaagagaatttcaatcttttaatatgtaatcaaatcaaattcagatattccagcgcctggcggattccgccgtcttccaaggcgccggtcacataatcagcctgtgatttcaagtctttagatccatttcccatagcaaccttaaatccggcagcctggaacattggcaagtcattattgctatcgccgaaagcaataacatccctcttttcgtatccaagtacattactcataacactgatcgcaagtcctttggaacagcctttcatgacaaattcaatcgttcttccaacaaaagatccactgtgaataatataatcataccatagggataattcctggcataatttctctggattacatccaggtgtgcgcttggcacttattttgttaaagtgaagattatgttcatttccacgaataggaagcagtttgtcaccgagttcctgagtgatcagatcagcaaaccagtctatgtcacttgtatattcatccagattatagtacatataatcattgccttccagtacagggataaaaccgtttgccttaatgatctctacggtcttccatgccaggtcggttggcatctcacgctcaaatacccgtgttccattatattcgatatatgctccaagattagcgataagtccgtcaaatccaatctccttcataagatattcaggaacaaaagcgtttgaacgaccggtacagatgaaagtcttatgtccgttttttctcagctgttgaagtgcaagttttgtatcttctggtgttccttttacaatatctaaaattgttccatctgcatcaaagaaaagacattttcccattgtaagtattccttctatattatagtattatctctcacctaaaaatcccataaacttacgtacagagtaattcaggataagatcctccggaatgtcagcctttcgagccaaagcttcggcatactggaagtcaccgatatgttcggtgccgtggctgtcactggagaacagaaccggataattaaagtgcttggacagattcaatattaagagatcagcataggtcgtatccccacgatatccatccggacttaaagaactgttattgatctcaagcagaacatggttttccattgcagcacggaaaagcgcaaaataatctacagggaatttttcgtcatcgcaatgaccgatgatgttaacattaggattctccatagtcttgatataagcacgggtgttctcatctgctgttccggacttaaaaattggacgatgcatacttgctataacataatccagagactctaaaatttcatcatcaaggtccagtgttccttcctgatccagaatatttacctctgcaccgtaaagcattctaacaccgagacgctttggttgtgcaaatgcaaggctgcggaaataagaaatgcgtccgccaccaagtgttttcggaccatgatcggaaattccaagcatcttaagcccagctgcattggcagcttttgccatatcagtcatggtcgcacaggttccgtgcccgctggcgatggaatgtgtgtggatatcaaattcataagaagccatataatccaacccttctttctaatcgttcacgcggcagacattgtgttgattcattcgccatgccgcatacataccttaagtatgcggtattttaagtaaaatgtcaataaattcgaggtgaaacgtaaagaaaaaacaaataaaacacaacatgaaccatattgggatttattgtaactttacagaaatataatgtgggatgtattgtgttttgattgactttgggggataaataaagtataataaatgttaatattggaagaaaggagtttaagagcaaaatgggactttatacttatgacagtactcccatcccgaagtcggacagaattccaaaactggtagagaacctgtatgcgaagatgcctgagattgagtcggcgagagcggtactgattacggagtcgtacaaacagactgagaatgaaccaatgatcatccgtagagcaaaagcgttccagcatattttggagaatattccgatcacgatccgtgacctggaacttgttgttggaagcagtacacttgccccaagaggatgccagacatttccggagttctcttacgagtggctggaggcagagtttgatacagttgaaacaagaagtgctgacccgttctacatctctgagcagacgaagaaggaactgaaagaggcgaatgcttactggaaaggccgtacaacaagtgacctggctacagcatacatggagccggagacattacttgacattgaacacaatatctttacacctggaaactatttctataatggtgtaggacatgtgacagttaagtatggtgaagttcttgagatcggattttccggaatccgcaagaaagcagaagatgagcttgcttctatgaaggtcagtgatggtaactatcagacaaaatcacgtttccttgaggcagtgatgatcagctgtgatgcagcgatcacatatgcccgccgttatgcaaagcttgcacttgagatggctgagaaatgttctgatccggtaagaaagaaagaacttcttatcattgcacagaattgtgcgaatgtaccggagaagggtgcgacaggattctatgaagcttgtcagtccttctggtttgtacagcagctgttacagatcgagtccagcggacattcaatctcccctggaagattcgaccagtatatgtatccttattataagaaggatctcgacagcggaaagatcacaagagagtttgcacaggaactgttggattgtatctgggttaaattaaatgacctgaacaagtgccgtgatgcggcttcagcagaaggattcgcaggttacagtctgttccagaacctgatcgtaggaggacagaatgaagatggtatagatgttacgaatgatctttcatttatgtgtattacatcatctatgcatgtattccttccaatgccttctctttccgtaagagtttggaatggatcaccacatgatttcctgatctatgcggcagagcttacaagaacaggaatcggactcccggcgtattataatgatgaggttattatcccgtcactggagagccgtggactgactttacaggatgcgagagactacaatatcatcggatgtgtagaaccacagaagtccggtaagacgaacggatggcatgatgcagcattcttcaatatgtgtcgtccgctggaactggtattttcaaatggtgtggacaagggtgtacagattggtccaaagacaggtaatgttgaggatatgaagacatttgatgaattctatgatgcttataaagcacagatggattacgcaatcgcactacttgttaatgctgataatgctattgatatggcacacgcagagagagcaccgcttccgttcttggcaagtatggtcgatgactgtatcaagagaggaaagacactggaacagggaggagctgtatataactttacaggtccgcagggattcggtgttgccaacatggcggatgcactttacgcagtaaagaaacttgtttatgacgagaacaagattacaatgcatgatctgaagatggctcttagtacaaactatggaaagggtctgagcagtgatgatgttgcagagatggtatcagaagtggcttctgctatgaagtctgccggacagccggtaggcgagaaagaagttgcggcaatcctgaagactgttgttgcagcgacagaatcagagcaggtgaaggcgaatggtgagagaatccttaagctgattgatgcagtgccgaagttcggaaatgatattccggaggttgatgcatttgcaagagacgttgcctatacttatacaaaaccactggagaaatacaaaaatccacgtggaggtatgttccaggcgggattatatccagtatcagcgaatgtaccgcttggcggacagacaggagccacaccggacggacgtctggcgcatatgccggtagccgatggagtatcgccatcagccggtaaggatgtgaacggaccgacagcagctgcaaactccgtttccagactggatcactttattgcttcgaatggaacactgttcaatcagaagtttcatccgtctgcactgagtggaagagaaggacttgagaagtttgtaggactgatccagtcatactttgatcagaagggaagccacatgcagtttaacgttgtcagccgtgaaacacttctggatgcacagaagcatccggaacagtacaaacatctggttgtacgtgtagctggatatagtgcactgtttacgacattgtccaagtcactgcaggatgatatcattcgcagaacagagcagggattttaagaataagagggagacagcatggaagaatatctgaagaccaaaggaagaatcttcgatatccagcggtattccatccatgatgggaatggaattcgaaccatcgtgttcctgaaggggtgcgtgctcagatgccgctggtgctgtaatccggaatcacagcactacgagatcgagacaatgatggtgcagggagaaccaaaagtgatcggtgaggacacaacggttgcggaagtgatgaagacggtagaaaaagaccgtacttattatagaagaaccggaggcggacttacactttccggaggcgaaagcctttgccagccgaagttcgcaagagaccttctgcgggcagcgaaagagtcaggaatcacaactgcgatggaaagtatgggatgcgcaccatacagcacaatcgaagagattcttccatatttagaccagtatctgctggatatcaaacacatgaatccagagaaacataaagaatttacaggacgctcgaatgaactgatgttagagaatgcaaagaagattgcagactctcatatgacagagttgagcatccgtgttccggtaatcccgggattcaatgatacagagatagaaatccgtgatattgccgcatatgtccgcaaacttggcaatgtaagaagaatgcatcttctgccttaccacaggctgggacaggataaatatgacggactgaaccgcccatacctgatgggtgatgtaaaaccaccgacaaatgaaaagatggaacgacttctgaaagtagcagaagaagtttccggtgtagagtgccggatcggtggttaaaaataaaaaaacacaatcagataatctacacgaagtcgaaaacagagaaaatagtgaaaataatcacaagaaacaacaaaaacaacggctgttcaaattgactaatgtgggattgtgtggtaaaataagttaagaaacaacacaaaacaaaagttttgacacgattccaaggaggagaaaaaatgcaaaacgaatacgaaatcaaaaaagaaatgtgtgaaatcggaagaagagtttacaaccgtggaatggttgcagctaatgacggaaacttttctgtaaaactgaacgaccatgagttcctgtgtacaccaacaggtgtcagcaaaggattcatgacaccagagtatatctgtaaagtagatgagaatggtaatgttcttcaggcaaacaaaggattcagaccatcttcagaaattaagatgcacatgcgtgtgtacagagagagaccagacgttcagtctgtagtgcatgctcatccactgtacgctacaacattcgctatcgctggtattccgcttacacagccaatcatgccagaagcagttatcgctcttggatgtgttccgatcgctaaatacggtacaccttctacaatggagattccggacgctatcgagccataccttcagcactttgatgcagttcttcttgagaaccacggagcacttgcttactcagacagccttctgagcgcataccacaagatggagtctcttgagttctacgcacgtctgttatggcagtccatgcaggttggcggacctcaggaactgaacgatgagcaggttcagagactgtacgaactgagaagacagatgggacttccaggaaaacacccggcaaacctttgcccgaacgctaaagctggtaagccaagctgccattcatgtggtggaaactgtggcggatcttcagcagcagctccagaaggaacagatgctgatcttgtagcttctatcacaaagaaagttatggaacagctgggaatgtaatctgacagattagtaaaggagcaatgctatgaatgagcaggaaattaccagtgcagttcaggctgtgctggatcagatgaaggaagcagctccacaacatacacacaaacatgtctgtcaatgcaaaaagcatcagatgacattgaagcttgctaatgccttgattgaaaaagttaaggcagaagcggcacgtgtaggtgtgaatgcggttgtagcagtttccgacaaggcaggtagacctgtagccgtccagtgtatggatgacgcctacatagcgagctttgacattgcattaaacaagacatatacttccgcgagccttaagatgtccacagcagagttgagtcggttgagtcagccgggacagccattatacggaattcagtttacgaatgatggtaagatcgtgattttcggaggcggagaggtactcgaagctgatggtaagatcgtcggtgcacttggtgtcagcggcggaactgctgagcaggacacagcaatcgcagcttacggaaaacaagtcttcaaggaggtattagagtgtctataaatgaacagatggttcaggacattgtacaggacgttcttgcaaagatgcagatcgcttctgatgtacagggagaccgcggtgtattcaaggatatgaacgaggccattgaggcagcgaaagcgtcccagaagatcgtggctaagatgtcactggatcacagagagaaagttatctccaacatccgtaaaaagatcatggagaatgcagaaatcctggcccgtatgggagttcaggagactggcatgggaaatgtcggacataaaattttaaaacaccagcttgtagctgagaagactcctggaacagaggatatcactacacaggcatggtcaggagacagaggtcttacattgatcgagatgggaccgttcggagtaatcggagcgatcacaccttgcacaaacccaagcgagacagttctctgtaacacaatcggaatgttcgcaggtggaaatacagtagtattcaacccacatccggcagcaatcaaaacatcaatctacgcagttaatcttctgaacgaagcatctgttgaggttggtggaccggacaacattgcttgtacagtagagcatccgacacttgagacaagtaacatcatgatgaaacatcctgcaattcagctgatcgctgcaacaggaggtccgggagttgttacagcagttctttcttcaggaagaagaggaatcggagctggagcaggtaacccaccggcactcgttgatgagacagcagatatccgtaaggcagctgaggacattgtaaacggatgtacatttgataacaaccttccgtgtatcgcagaaaaagagattgttgcagttgattctatcgctgatgaactgatgcactacatggtaaatgagcagggatgttacctggcttccaaggaagagcaggatgcactgacaaatgtagttcttgcaggcggaaagctgaacagaaaatgtgttggacgtgatgcaaagacactgcttggaatgatcggagttacagttccggacaatatcagatgtatcacatttgaaggaccaaaggaacacccactgatcgcaacagagcttatgatgccaattcttggtgtagtaagagcgaaagatttcgacgatgctgtagaacaggctgtatggcttgagcatggtaacagacattccgctcacattcattccaagaatgtagatcgtattacaaaatatgcaaaagcaattgacacagcaattcttgttaagaacggaccatcctatgcggcacttggattcggaggcgaaggcttctgtacatttacaattgccagcagaactggtgaaggacttacaagcgcaagcagcttcacaaagagaagacgttgcgtaatgacagacagcttatgtataagataacggaggtatagacaatggaaatgaattctgctaatgtagaagctgttgtaaaacaggtacttgagagcatgctggaaaagaaagttccagaagcagctccggcacagaaagcagcaggaaatgaaattccaaagacagctcatgtagctatgcttacagcacttgagcattttgaaatcaaagagtatccgatgccggaagttggtgacggagatattcttgttaaagttgaaggatgtggtgtttgtggaacagacgctcacgaattcaagagagacccattcagccttattcctgtagtactcggacatgagggaacaggtgagatcgttaagatgggtaaaaacgttaaagttgacagcgctggaaaagctctgaatcttggagataaagttgttacatgtatgatcttcaaggatgatccggagatcacaatgtacgacctcaacaaacagaacgtaggcggagctgatgtatacggacttcttccggacgatgatgttcatctgaatggatggttctcagattacatcctgatccgtgagggatctacagtattcaacgtaagtgatctggatctgaaatcccgtgtactgatcgagccatgtgcagtacttgtacatgcagtagaaagagctaagacaacaggaatcttaagattcaacagcagagttgttgttcagggatgtggaccgatcggactgatctgtatcgcagttcttcgtacaatgggtattgagaatatcgtagctgtagacggagagcagaagagacttgactttgctaagagaatgggagctgagaagtcagttaacttcaaagatttccagggaatcgatgcacttgcacagggagtaaaagatgcattcggcggacatgctgctgacttcgcattccagtgtacaggatcaccgatcgctcatgcaaacatttacaaattcatccgcaatggtggtggactttgtgagcttggattctttatcaatggtggagatgcaacaatcaacccacacttcgatctttgctcaaaagagatcacactggttggctcatgggtatacactctgagagattatgcaactacatttgatttccttaagagagcaaaagcaatcggacttccgatggatgatctgatcacacacgagttcccgctcgagcagatcaatgaggctcaccagacaaacctggctatgaaaggtcttaagattgcaatcatcaacaaataaggtgagagagtatggaagcagtaggtatgctggaagtatttggacttgcaacagcatttgcagcggctgacgccggatgtaaagcaggaaatgtaagactggagaacttcgataaaaataaacctgcgaatgcagacgaattgcctgtaccgttgatcgtaatggtcaagttccgcggacaggttgcagatgtggaggcagcacttgaggctgctacagcgaaagcagagtcaatgacaggaattgtcacaaagtataagatctcaagaccgactgaggatactgagaagatgcttaagcttaacgcatttgataaaggaacaccacacaaagtaacagacgaagaagtcgaagaaatttaggaggatattacaatggcaatggcacagcttgcattaggaatggtagaaacaagaggacttacagcagcaatcgaggctgcagatgcaatgacaaaagcagcagaggttacactcgtaggaacagagaagatcggatccggacttgtaacagttatggttcgtggagatgttggagctgttaaagcagcagttgagacaggtgctgacgcagctggaagacttggagagcttgtagctacacacgtaatcccaagaccacacaacgacgttgagaagatccttcctacagtatagtttgaagtcaaacagctagaaaaggagcagtctcatgggaaaagcgtatggattctttgaaatcccaagtgttacggcagcagtggtagccgtggatatcatgtgcaagactgctgatgtgcagttcgttacatgggagaaaaaactgggtggaagacttgtcacgatcataattcgtggtgatgtatccgcagttgcgcaggccattgaagctgccgagcagaatggaatcaaaaaaccagtgagcacagtagtgatcccaagtcctcatgaggagatcttgagaatcattaacacaagtgtaaacaaggttgtataggaggcagctacagatggcagacgaaaaagaaaagaaaacaacaacagccaaagcgccagccaaaactgtacgcagagtaagaaagacggcgcaaaaggcagaaacggttcagaagaaaccggaagttcagaaggaggaacgcagaatgtcacaggaagcattaggaatggttgaaacaagaggacttgtagcatctatcgaggcagcagattcaatgttaaaggctgctaacgtagcactcgttggaacagagaagatcggatctggtcttgtaacagttatggttcgtggagacgttggagcagttaaatcagcagttgagtctggagcagagtcagcaggaagacttggagagcttgtagctacacatgtaatcccaagaccacatacagatgttgagaagattcttccacagatcaaataatagtcaaaggtaaataaaaccggtactttcaggggattaagcgccgggcgctgatcccctgagagtgcttaaacaagtaagtggagcaatccactttgcgaggagacacaaatatggataacagtaatgtggaattaattacaaaaatggttctcgaagcagtagagaaaaagaatgctgctcagtctggagaaggttttctcgttccaatcggagtgtccgcaagacatatccatctcacacaggagcatgtcgagattctgtttggagaaggctaccatcttacaaagttcaaagaacttatgggtggacagtttgcatcaaacgaaaaggttacaattgttggtcttaaattaagagcaatcgagaatgtaagagttcttggaccagtcagaaagaatactcaggtagagatttctgcaacagatgcaatcagcctcggtgtaaaagcaccaatcagagaatcaggaaatattgcaggaagcgcaccaatcgcgatcatcggaccaaaaggtgcggtgtatctgaacgagggatgcattgttgcgaagagacatattcacatggctccgaaagatgcgatggcagcaggagttcatgatggtgatatcgtatctgtaaaagcagataatgagagaggaaccatctttaacaacgtacagatccgtgtagatgatagctttacacttgagatgcacatcgatacagatgaagcaaatgcagcgcagattaagagcggggataccgtgaggattgtatcatgttaatgggaaaagttgttggcagtgttgtatcaacacgcaagaatgaaaacttagtcggaaataaattcatgattgtagaagtggcagaccatatgcgtcagggagcaaaacagattattgcaatcgataagatcggtgcaggaatcggcgaatacgttctggttgtacagggaagtgctgcgagaatcggaagtggtatgccggaagcaccaatcgatgctgcaatcgttggaattattgacgaaggattaggactggagtagtgaaattatggatatgaaagaattaagcagcatattgcagcagaacggtatcgttggtgctggtggtgcaggctttcctacatatgctaaattagatgaacgtgcagagacaatcattctgaactgtgcagagtgtgagccactgcttcgacttcacagacagctccttgagaaatatgcaaaggagatcattgatacatttcatatgatcggcgagacagtcggtgcgaaagaagtcatcattggtattaagaaagcttacacagcaacgatcgaagctgtaaaggccgttatgggacagtatccggaagtaagacttggactgttggatgaagtatatccggcaggtgatgaggttgttcttatttatgagacaacaggtaaagttgtaagaccgggcggacttccaatcgaaagcggcgtagctgtattcaacgtagagacagtttacaatgtatacagagcactgaatgagaagacacccgttgaggacaagcttgtatcagtagtagctgaggtagagcacccgatcacagttcgtgttccaatcggaacaccactggaagaagtagtagctcttgccggcggtgtaactacaaaagatgcagtttacttcgttggtggacctatgatgggtaatatcggaacaggagcgcagcctgttacaaagacaacaaatgcaatccttgttcttccgaaagaccatcacatcattcagaagaaattaaagaaaaactcaatcgatatgaagagagcagcagcttgctgttgccagtgtacaatgtgtacagacttatgtccaagacatctgttaggacatccgattgagccaaataaatttatgcttgcagcaacatgcaaggatgtacaggagccgaacatcttcatcaatacgttgttctgctcatcctgcggactttgtgagatgtattcctgtttccagggactttcaccaagaagtcttatggcagagtacaagggaggtcttcgtgcaaacggaatccgtcctccgaaagtagaagcaaaacctgtaggaccggaaagagaatacagaaaagttccgatggagagacttatggcgcgtcttgatcttacgagatataaccgtgaagcaccgcttgatgaatcagcagtgccggttaagacagtacgtattctgttaagtcagcatattggagcacctgcttctgcaattgtgaaagcaggcgacatggtaactaaaggacagatgattgctgaaccaggaaagggattaagcgttggaatccacgcatccgtgaatggtttagttacagaagtaaatgagaaatatattgtcatagaatctcaggaaggacgtgcaggcaatgagtaaggctattggaatggtagaatataagactgtttcagcaggtattaccgcagctgatgctatggtaaagacttctgaagtcagcataatcgaagcacagacagtatgtccgggcaaatatatcgcgatcattacaggtgacttaagtgccgttaaagcagcagtggataatgcaaaagagatgcatggtcttcacctgatcgacagttttgtgctcggtaatccgcacgagtccatcttcccggcaatctacggtgctgcacatattgaagacgtatccgctcttggtattatggagacatacgatgcatcttcaattattgtagctgctgatgaggctgcgaagacggctatcgttgatttgatcgagcttcgtatcgcacgtggtatgtgcggaaaatcctacatgctgctcactggtgaagtggctgctgtagaagctgcaatcgaaaaagctaaggaagcaatcaaagatagaggaatgttccttgactcttccgttattgctcatccggatgctcagattcgcgacgcaatcttataatgaactctgctttaatgtctgagggaattatagttcaataccagtaacattatattggacttaggacaggaggcagttagatgcttgcgatagagagaagaaatgaaatattagaaaaactgcagaatgacagaagagtcgtagtaagcgaactgagtcagatttacgaggtttccgaggagacaatccgaagagacctcgataaactggttcaggacggtttcgccataaaaagctatggcggtgccgtgatcaatgaaaatgtgaatatcgagcttccgttcaacatcagaaagaatcgcaatattgttggtaaacagcatattgcggaactggtgagtgaacagatcaaagatggggacagcatcatgcttgatgcaagttctacagcagtgtatgttgcaaagacgcttctcgaacagggaaagaagaatcttaccgtgctcacaaactctgtggagattatcatagagctttttggggcgcaggattggaaggttctctctaccggaggagagtcaagagaaggatcctttgcactggtaggttatcagacagaccggatgcttcgatcttatcatgtagataaggcaattatctctgcaaagggaattgatatgaacgctggacttacagattcagatgatctgcatgcgaataataagcgaacaatgctgacaagagcaaaagaaaaaattcttgctgtagacagcagtaagttcgatcaagtagcatttgctgagataggttcattagatcagatcacaactatagttacggatgcaaagccggaaacaagatggcttcagcattttgataagattggtgtaaaatgtatctatccaaagtaaggaagggcagttatgaaaagctttcagattaaaactagagtaaattttggagataatgcgctggatcgactggcagaagtgccatataaaaagatcctgatcgttacagacccatttatggcgaaaagcaaaagtctgaacctgattctcgatccaatcaaaaaagcaggtaaggaatatgatatctttcaggatattgttccggatccaccgattgagaagatcagtctcggtgttaagaagatgcttgaatataagccggatgcaattgttgcagttggtggcggatcagcaattgactcctccaagtcaatccgtgaatttgcacttcgcgtagatcattacgcagaggtagggctgattgcaattccaacaacaagcggtacaggatcagaggtaacttcatttgccgttgtatcagacccggcagaacagagaaaatatccacttgtatcctgggaattgacaccagatgaggcaatcctcgatgcagaacttgtaaagagtgtgccaccggcgattacagcagatacaggaatggacgtatttacacacgcacttgaagcatgtgtaagtacagagagaagcgatttctcaacagcacttgcagagaaatcgatcgagttggttggagtattccttcttagagcatatttggatggaaatgatactcatgcacgtcagaagatgcattccgcatcctgtctggcaggactggcattcaactcagcatctctcggactgaaccatggtatggctcatcagttaggtgcaaagttccacatcccacacggacgtgcgaacgcaatgcttcttccacatatcattgaattcaacagtgatatcaataaacatagtaagagtcagaaagaatatcttccggctgttaagcgttatgcaactgtagctcagatccttggactgagcagctacaatgagatcatgacagttagatcccttgtaaactgggtacagtttatgttaaaagagatggatattccgctgtcaatctctcagatgggtacaatctcagaggaagagtacttcaatgcaatcgacagtatggcagatgccgcacttgaagatggatgtacagcaacaaacccgagagtaccaaataaggaagatgttattgaaatctacaagaaattgtggaaataataagtgtaaaaagaagtaaaaaagaagctgcgtattgtagcttctttttttacactctcttttgcttctatttttaggcatgtttttaaagttctcgggtaacggtacctatttattaattgagtgttatctgaaagaattgttgtatatactatatcaaatacctgggaaatggacaggaagcgcgaaatgaaattacctatttatatagaagcagcaatgggagtttttctggtagtgattctggcaatggcaggaagaaacggaatgattcctcagaaccagaaaaataatgttatgaaacagtcagaagtagaacagaaatcagattctgacatgcaaaacgaaaaggaagcagttgcggaagaggcaacagattcgatagaagaagttgcacagactgacagcgtagcaataacagcacagatgtgttctccggccggacagtatccggtcattggggagagtgttgttacggtggatgaacttgcagattatttcaatcaatcgggatacgaatatccgtcggaagaactggcaaaaggtggagcagataccatagaaacattctgccagatctactgtgaagaagcagaggcagaagacatccgggcagaggttgcatttacccaggcaatgaaagagaccggctttcttcagtttggtggagatgtaagtattgaacagtttaattttgccggaataggaacaaccggtggaggagtgccgggaaattcttatccggatgtcagaacaggagtgcgggcacagatccagcatctgaaggcctatgcgacagatgaaccgctgaatcagacttgcgtggataaccgttatgaatatgtgaaaaaagcttccgcaccttatgtacaatggctgggacagaaagagaacccggaaggagccggttgggcgacgggagagaactacgggtatgatattgcagggatgttgcaacatttacttttaaaagagcaaggttaagaagataaggctggacttccggcggtggttatgatattttaagatttcttaaagaaagggaaatcccttgacaaatcagcctttgacagctatagtagtaacagttaaaaagtatttaacaactatgtaaagatacaggtgttgaagaagaggagtacatcatcgcttcccacagagagaaccgttcagattgctaagaggatctggctgtgagacggtttggaaaaaggatgatggaaggtagcttcggagccggaattctgaaaggtcgaagaggttggataggagttcccggagtcgttcacgttacagaacgaagagatgtatatgtaaagaacaaggttaatacaaacagtaacaagttcttacatatataaataaggtggtaccgcgagattttcgccctttacgtgaagtagagggcgttttctagttatagaagaaagagatatccacttttaaaacaatgagattgtggaaaacaactacaaaattaacataatatgtggaaaaaggagaacaatcatgagcaaagaactcgcaaagacttacgatccgaaacagatcgaagagaaactctatgagagatggtgtgagaacaagtattttcatgctgaagtagacagaagtaagaaaccatttacaacagtaatgccgcctccgaatattacaggaaagctgcatatgggacatgcacttgacaatacactgcaggatattctgatccgttacaagagaatggagggatataacgcactgtggatcccgggaacagaccatgcagcaatctctacagaggttaaggttacaaatcagctcaaagaagagggaatcgacaagaaagaactcggacgtgagggattccttgagagaacatggcagtggaaagaagaatatgcaggaacaatcgagaaccagttgaagaagcttggtatttcctgtgactgggacagagagcgtttcacaatggacgagggatgttccaaagctgtagaagaagtattcatcaacttatacaacaagggatatatttacaaaggttccagaatcatcaactggtgtccgaaatgtaagacatctctgtcagacgcagaggtagagcatgaggatcaggacggaaacttctggcacattaagtacccgatcgccggaacagaccgtttccttgagattgcaacaacacgtccggagacactgcttggagatacagcaatcgccgttcacccggatgatgagagatacaaagatatcgtaggaaagatggcaatccttccgcttgtaaatcgtgagattccgatcgttgcagactattatgtagacaaagaattcggaacaggtgctgttaagatcacaccggcacatgacccgaatgacttcgaggtaggaaagcgtcacaaccttccggaaatcaacatcatgaacgatgatgcaacaattaacgagaagggtggaaaatacgcaggaatggatcgttacgaggcgagaaaggcaatcgtagcagatctggatgagcagggataccttgtaaaagttgttcctcacatgcatgcagtaggaacacatgaccgttgtggtacaaccgttgagccgctgatcaaacagcagtggtttgtaaagatggatgagcttgcaaaaccggcgatcaacgcactgaagactggtgaacttcgtttcgtaccggagcgttttgacaagatttaccttcactggcttgagaacatcaaagactggtgtatctcccgtcagatctggtggggacacagaattccggcttattactgtgatgagtgcggtgaatttgtagttgcgaaagaagcaccggagaaatgcccacactgtggatgtacacatttcacacaggatgaagatacacttgatacatggttctcttccgcgttgtggccgttctccacacttggatggccggagaagacagaagatcttgactacttctatccgacagacgttcttgtaactggatatgatatcatcttcttctgggtaatccgtatggtattctcaggatatgagcatacaggaaaagctccgtttaacacagtactgatccacggtcttgtaagagactctcagggacgtaagatgagtaagtctcttggaaatggtatcgatccgcttgagatcatcgacaagtacggtgcagatgccctgagattgacactgatcacaggaaatgcacctggtaacgatatgcgcttttacaacgagcgtgttgaggcaagccgtaattttgcaaacaaagtatggaatgcatcaagatttatcatgatgaacatggagaagaacgttgtagaagaaccggaagacttcctgctcaaaccggcagacagatggatcctttccaaggtaaacagtctgacaaaagaaatgacagagaacatggataagttcgaactcggtatcgcagttcagaaagttcatgactttatctgggatgagttctgtgactggtatgtagagatcgcaaaatatcgtatctaccatgcggaggaagattcacagtccgcaaactgtgctctgtgggtacttaagacagtacttggacaggcactgaagcttcttcatccatttatgccatttatcacagaagagatttatggagcacttgtaccggaggaagagtcactgatgatgtcaagctggccggtatacagagaagattgggaattcccatatgctacagaagttattgagcatgtaaaagcaatcacacgcggaatcagaaatatgcgtgctgagatgaatgttccgaataacaaacgtacaaaggtttatattatcagcagtgattcaaaaatgcttacagcacttgaagtattcaaggaatccgtaaaaccattgatgctggcaaacgatattattcttcactatgagaagaaagatgttgctgatgatgcagtatctatcgttgttccgggagcaacagtttacctgccgctggaagaccttgtagacttcgagcaggagagagaaagactgaagaaagaggaagagagactcaacagcgagataaagagagcacagggaatgcttgcaaatgaaagattcacaagcaaagcacctgcagataaagttcaggctgagcgtgataaacttgagaaatatacaaagatgcttgagcaggtaaaagagagaatcgatagtctcagataactgtggggggagaaaagctgcaaaaaagcaggaaactgtaaacagcagtttagacacagtatcaggtattagacggcaaaaagtcgcacggcagaaaggaactaagatcccatgccgtgcattttgcctataagaaagaggttatagatgaagcggattcatattaaaaaaccagatatcaaaggattttttacaaaggtcaaaaatctgaaaccggaagatatcaagagacactatcaggagaaaaaagcaagacgccagagaattctggaacagagaagaaacagtaaatttgcgaaaaagatgcagccggtttataagtggatgaacagattttcactcgttcttcattatctgctggcctgtgttttaaattttttgatcgaggtgatctcaaggcattctttttttgaagcatggagctacatgacaggaacaccgctcgtgtttctgtttaacgcgttttcaatttttgcaacatttatgattgtttatctgttccgcagacgagtgtttgtcagaattcttcttagtgtattctggctgttcctgggagcatgtaacggatatctgctcctgaagcgagtgacaccgttcaatgcacaggacttgaaagttctgtcagatgccttggaactgacaagtaattactttaatggctttgagatcgtgatgcttaccattggaatcgcagctgttgttttgtgggtgatttccatgtggcgccgcggtgggcagtatactggaaagatgcaccgcattattgcagtgatcgctgttgtggcatccggatttgcctatgtagggcttactgatgttgcaatcgacaagcgagtgatctcaaattattttggaaatatcgcatttgcttacgaagactatggattcccatattgcttcgcagcaagcttatttaatacaggaatcaatcagccggccggttacagtgaagagacgatggcggagattaacaaggatggatgccttaacgtgagtgagacaagccgttcgaaagaggaactgccgaatatcatgtttgtccagctggaatcttattttgatccgacagaggtagaatggctgagattttccgaggatccgatcccaaatctcagaaagctttatgctgactattcttccggatattttaaagttccatctgtcggagcaggtacagcgaatacagagttcgaggtgcttaccggaatgaatatgcgtttcttcggaccgggagagtatccatacaagacttatgtgaagacgacacctcttgagagtgcggcaagtgcgctttcatcccttggatatggtgcagaggcacttcacaacaacggcggtaatttctacagtcgtgccaaagtatacaacaacatgggattcgaccattatacaagtaaggaattcatgaatatcttaaagacgactccgaagggatgggcgacagacgatattcttgttccgaacatcatggagtctttggacacaacagacggaacagattttgtatgtacaatcagtgtgcagggacatggagattatccgacagagccgaccttggaaaatccggagatcaatgtaaccggagtggaagatgaaggcaagagaaatgcatgggagtactatgtaaatgaagtccatgagatggacaaattcgttggacagctgatcgatgcaatcgagcagagaggggaaccgacagtgctcgtattctacggagaccatctcccgacacttggtctggaagcaaaagacctgaaaggaaaatatctgtacaatacaaattatgttatctgggacaatattggactggaaaagaaagatgggaatatcgctgcttaccagattatggcagaagtctttgatcgtttggatattcatacaggaactattttcaattaccatcagcagagaagacagacaaagaattatcttgccgatctggaattactccagtatgatatcatgtacggaaaacagtatgtatacaaggacagtggagctccaatcacagaaggacatatggtcatgggggtaaaggatgcgacgatcaccagtgttgtggagcagctgaaaggaacttatagcatttacggagagaactttacaaaacaaagtaaggtttatatcaacggagagaagcagacaacaaaattcctgaacaatacaagactggatctgaaagagtcagaaatcaaagatggcgatcagatcatggttgcgcagtgcggttcaagtaatacaatcttccgtacatcgaagacttatgaatatacaggaggccagcttgtagaagtgacagaccaggatacggatgttgagaatggaagacaggcctttgtagaacaaaaggaagaaaagaaaaaatgacctataaggaaatcgtaacctatatagaagaaattccgagatttacaagaaagcactctctggctcatactagagagatgcttctgtttttgggaaatccgcagaatggaaagaagatcatccatgtggcgggaacgaatggaaaaggttctgtatgcgcctatctggatgcgatgctcagggcagaaggaaaaagcaccggattgtttacttcaccgcatctggtgaaaatgaatgaacggattgttctgaacggaaagcagatcagtgatgaggatttctgcgaagtatttgaagagaccatgcaggctgtccgcaggatgcaggatgcaggattggagcatccgacatttttcgaatttttatttgcaatggcgatgaaagcttatgacagagcaggaatggaatacattgtccttgagacaggacttggaggtcggctggatgcaacaagttctgtagaaccggtcgcctgcgtgatcacatcaatcggtctggatcatatggaatatcttggtgatacagtggaacagattgcgggagagaaagcaggaatcatccggccggaagttccggtgttctttgcacagacagcaccgggaagtgattctgtaattgaaaaaacagcagaaaaagaaggctgtttctgtaaaaaaatagggaaagatgcgtacgaaattcttggaattgaagataaacatattgcattttcctgcgcaagtgcttattatggaactaccacgtggaaattaaataatattggaacctatcagccggggaatgcactgcttgcgatggaagtgatgcgttatcttttcaaagaaaacggtcatctacaagagtggagaacagcacttgccggggtgaaatgggcaggaagaatggaagagattcttccaaaagtatacgttgacggagcacataatgtaagtgccattcaggcatttgcaagaagtgttccgaagaatccagatggaaatattattttattttcggcggtaaaagataaagaatatgaagaaatgatttcgtatctatgtaaacatgctgatgcggaagaatatgtagtaacattgatcgacggagatcgagcgacagatgcacacattctgggtgaactgttccggaaatatacagaacagccggtgacagtgattgaatctgtccaagaggcaatgcagtatgtattgcggattcaggagagaagaacggtatattgtctcggttctctttacctgacaggaatgatcaaagagattatacaggaatctttaagcggatgtggggaggtttgattgcagatgcttaattatgaagaagaactcagaaaattcaagccaagtctcgaggtggaccagattgaggaagctgtttacaaggaagatctgacagatatgcaggatatcgtaaaagaggttatggcaaagaaagaaaaaacggtgagaagatagaaagatagtggtgggtataaatggattacacaaagaagatcatgtatcagtcaaattcctggtacaatgatggactgcgcaaagcccaggtgagagatatgtccggggcaattgtttccttgcagcagagcctgcagtataacagggagaatattgcggcgcggaatcttttaggtcttgtgtattatggcataggggaagtttcagaagctcttgtggagtggatcatcagtaagaatctgtgcccaagagacaatattgcagattattatattaaaaaagtacagaattcagcgaatgaattagaatcactgaatcaggcgattaagaagtttaaccagtgtttggtttactgtcagcagaacggggaagatcttgcgatcatccagttgaaacaggtgatcgcgtctcatccgacatttttgaaggcgtatcagcttctggctctgatctatatacagatgaatcagaatacaaaggcaagacagattcttatagaagcaaagaaattagatacaacaaatgaactgacactgacctatttgcaagaagttacaaaacaacgtggcagatatgggaagaatgcagagagaagtttccggaaaccaaaaagtgcgacagtagaatacagtcttggaaatgagacaatcattcagccgaaacgttctaagatccgggatatggcacagcagcttgcatttgccaatatattgatcggaatggttcttggtgctgctttgatctggtttcttgttgctccggcggtgaatcagaaccgctcggagaagttgaataatcagatgcgtgcatacagtgaacagatcaacacactggaagcacaggtgagtgcccagacaagaacactggatcagtatcgagcagccggagacgaggcacagaaagcagttgatcaggcaaaggcaacatctgacagctatgagaaactgcttcaggtttcaagtcagagccattccggagaatatagttatacggatatggcagacgcgctgcttgagattacaagagattctcttggagacagtggaaaagagatgtatgatacactttctgattctattttcccaacagcatgcaggagaagatatgcagccggtgtagattcactgaaatcagaggactatgatcaggcgattgagtacttgacgaaggttgtgaagatggacgaaagttataatgatggacaggctatttatcgtctggcacaggcttatcagggaaaaggtgatacagagaatgcaaagacctggtatcagaagatggtagatacttataataattccaaatatattgaggatgcgaaaaagcagcttgcaattctgaatggagatgccagtgcagatacaagttcagatacaagtgcagatagtagttcagtatcagaggactctgaaaattccgataactccgacaactctcaggatggcggggataatggagattccgataattctgacaatacagaggataacgaataagattacgaaggaaaaggatatgcgaagaagcatatccttttttagcgtacggattcaggtaattaaacggaaaatgagaaaagcaggaggcatgaaaatatatgagatatcaggtacaggaaaattgtctgacaatctatcttccaagagaggtagaccatcataatgcagatgaaataaggaaagaagcggatgcagtgatcagcagaaatcatatcagatatgtgatctttgactttgacaggacagattttatggatagttcaggaattggaatcattatggggaggtataagaccgtcagtctgatcggaggagaagtctgggcggtacatacgaacgaaagaatccggaagattcttacattttcaggagcagcaaagattatgcagatttatgagggggaaaagtgatggaggcgagtaatacacagaataatgagatggagatccgctttgacagcagatcagaaaatgagggatttgccagagtatcggtagcatcctttttaacacaacttaatccaacggtggaagaagtagcagatgtgaagactgcagtgtcagaagctgtaacaaatgcgattatccacggatatgaacagagagtagagaaagtaaagatacattgtagtatagaaaaccagctttttacagtagaaatatcggaccgtggaaaaggtattgcaaatgtggaaaaagcaatggaaccgatgtttacaacaaaaccggaggatgatcgttcaggaatgggattttcttttatggaagcatttatggatactgtggaagtagagtcaaaggtaggggaaggaaccagtgtaaaaatgactaagacaataggtaaagggagcagaatatggacgacacaatcgctttaatcagaaagtcacacgacggagataaaaaagcgagagaagaacttgttgaaaaaaatataggtcttatctggtgcgtagtaaagcgattttacggaagaggtgcagaaccggaagacttgtttcagattggaagcattggactgcttaaggcaattgataaatttgatttttcttatgaagtacagttttcaacctatgctgttccaatgatatccggagaaatccggcgttttttgagagatgacggaatgataaaagtcagccgttcattgagagagctgtcctataagagtctgcaggcgagagaaaagatgaccaggatactcgggagagaaccgacattgaaagagttatcagaagagcttcagatagattgtgaggagatcgtccaggcaatggagtcgtcagtggaggtggaatccatatataagccgatccatcagaaagagggaagcgagatccttttgatggataagctggaagaaaaagacaggcaggaagaaaaggttcttgatcggattgtattaaaagaagtactggaaacacttgaagcgaaggaacggacgatcatttatctgagatattttgcaggaaagacgcaggctgagataggaaagaaaatgggaatgtctcaggtgcaggtgtcaaggacagaaaaaaaggtgctggagcggatgcggaaagaaatgaagcggtagagtttaccatcttttccaaaaaaacaatcccgctccgattcctttccctaatgcaaccattaccacaaacaccgcgagataccggacaatccttgcccgtctcataaaaatgggaaatacattcaaaatttctgcaagtgccattgcccagcaaccaacaaaaatccctccgaaaagtccataaattgcaagaaatatcatccttcccggaagattaacttcaaaaatctgaaacaagtttccaaggatcgcaccggctgctaccatatcttcataaattaaaatatgattgccggtatgggtacgatctgcaaaatctgagatcacaccaagttccacaatgaaagaaaagacaccgccagctactatcattccggcacttaaaccaagcaatgccaggaaaattatctgcaacaagttcatttttcgacctccagttctttcttttgccgtgctgcattttccaccagagttgtctggatatcattttcataaagacgcatctgtatttccatcggtgtaggatctactgtaaagcgtttcttaccaaagtgattaaaaaatattagaattccgattgcaagccctatggaatacgtgacttccagaacagaaaaaccatctgtcttctttcccatgatcagttcataaatctgaccaaacagcttcgttaccccaacatcattattgaatgccatgattgagaaggcagatccaaagaaaatcactgctgataccagcactacctttaaaatgtgccagagaagaggtggtgttttctgattttcataagtaacgataatatctgtttcgcccagattctgaatctccagccggggatactgttcatgaatacaggcaatgattttcaacacggaaattacatagcgctgttctttttcctcccggatcttcaagatccgcaaagtttttactttcatcaggatggtcttgtctgaacactccatactcaggagatctcctaacatgacgttttgctttgatacctcaacattcctgtctgctttgagataaagagttgttgattcagatgccatggacgatcacctccagtttcttatccggagcagaatatttgttactgttcacacgatgtgcgaccagcaacgcatctcgccattttaaatcgcctttggcgatggggcgagatgcattcaagtcaaaacgcgcatcctccgtgtcaatcagcggagtgattgacacgggagtgaacagtaacgaatatttcacaagatatccctcatcattttgcattttcttctgtccgttccaataaaacagaccaataacaactgcgcatagtaaaaggattattaaagcaaaccatctctttttcgctctgtttttcatttcatcagacctcctgaagtgttttttctattatttggtaactgttcagagccaagcaaaatttcaaaaaacaggtataaaatgcttgcatttttaaaactgtttttgaaattttatttggcggatacgccacaccgacgaaatgcgtagcattttggaggttggctctgaacagttacattatttgcagctttaataaaaatatacttttcgttttcattatcttgacaagcaataaatcctgtactaaaataagtacataagcaaaaccgaaacgtttcggttttggaaataaggaggacgatacgatgccattagttacatcagaaaagatgcttttagacgcaaagaaggatggatacgcagtaggcgcattcaatgtagagaatatggagatggttaaagcagtcatcgctgcagcggaggagctgaacgcaccggtgatgcttcagacaacaccttctactgtaaagtacggaacattggagacatttgcaggaatcgtgaaagcagaagctgcgaaaacaaagatcccggtatgtctgcatctggatcatggcaatagctttgaacttgcagttcaggcaatgaaagctggttacacatctgttatgatcgacggttcccacgaagattttgagaataatatcgcagtgacaaagaaggttgtagatgtagcaaatgcatttggtattccggtagaagctgaacttggtaaagttggcggaaaggaagacgaccttgaggctgatgctgatacgaacacagatccgcaggaagcgaaagaattcgtagagcgcacaggagtttcctctcttgcagtagcgattggaacagcgcacggcttttatgtaggaaccccggttcttgacaagccaagagtaagcgcaatcaaagaagttgtagatgttccgctcgtgcttcatggagcttccggactgagtgaagaagacgtaagagaatgtgtagagcgtggaatgtgtaaagtcaactttgctacagagcttcgtgttgcatacacagatgccgtgaagaaactgcttgaagagaagccggagacattcgatccgaagaaactcggtgttgttgcgatggaagctgtaaaagaacaggtgatcgcacgcatgaagatgtgcggatgtgatggaaaagcaaaataaaacaagtgatagcttacaagatacagaataaggaaataagtttatgggtgcaacgatgaaagacattgcccgagagacagggctcggacttgcaacaatttcttcttatctaaatggaggaaatgtgcgtgagaaaaacagaatcaagatcgaagaggcaattgagaagcttcattttgaggtaaatgaagttgcaagaggattaaagacaaaccgaacgaagaccatcggaatcatcttacccgagttgaacaacattttcttttcagagattattacagcagcggaagatttattaagaagtcatgggtatgcgacgatgatctgtgactgcagatccgatgtgaagcgagaagaagaggcagcagaattccttcttcacagaagagtggatggcttgatcatgatgccaaccggagcagagaagaaagtatttgatagatttagaaaatccggaagaccggttgtactgatcgaccgaaggatggagaacggagattgcgactgtgttcttgtagacaatgaaggagcagcgcagaacgcagtgaaacggctgatgaaaaaagggcataagaagattggtatgatcacaggaccggataatgtgtatacagcaagggaacgtcaacgaggatatgagcttgcgatacaagaatcatccagagctagatcagcacaacaatcagatttaaaaggcaaaacagatagaacagatacaaaacttctggcagatggtaactatacgattgccggcggagcgaaagcgatgcgcaagctttacgaagacaatccagatatgacagcagtctttatctccaactacgagatgacagtcggagcaatgatggagatcaatgaccttggtatcaaagttccggaacagctgtctgtgataggatttgataacatagattttgcaagagctgtagtaccaagattgacaatcgtgacacagccaacggaagagattggacaagcggcagcaaatctgttattgagtcatcttgaagataaggatgaaacatcagataaaacatcagacaaaatagaaacaacagagacaatctggctgaaaaccggattcgtagaaggagaatcagtggcggacatttcataaagaggaggagaccatgggagaatatttattaggaatagatatcggaaccagtgcctgcaagattgcagtctttgcaaaaggcggaaccgtcaaggcaaccggaaccggtgattatcaggtttattacccacatcctggatgggcagaacagaatccggaagaatggtgggaagcagtttgcgatgcaatcccaagggtactcgtaaaaggaaatatttccccggaagagattaaaggaatcggaatcgatggacagagctggtctgcgattgcagtagataaagatggaaatgtacttacgaacaccccaatctggatggacacaagagccacagatatctgtgaagaattcaatgaaaagattgggaaagacaagatctttgagctttgcggcaactctttgcagccatcttatacaactgcaaagatcatctggtatcagagaaatctgccggaagtctatgcaaagacttataagatccttcaatccaacagttatattgcatacaaactgaccggtgtgatgacacaggatctttctcagggatatggccttcactgtttcgatatgagaacaggaacctggaatgaagagatgtgtcaggaatttggattttcttctgagctattgccggaaattcatgcctgtcatgaagtgatcggtgaggtaaatgagaaagctgcgaaagaaagcggactggcggaaggaacaccggtcgtggccggaggactcgatgcagcatgtggaactctcggcgcaggagtgatccacagcggagagacacaggaacaaggtggacaggcaggtggaatgagtatctgtaccgaccagtatcgtgccgatgagcggttgatccttggatttcatgtcgtgccggattgctggctcttacaaggcggaacaaccggaggcggcggagtgatgcgctggcttgagcgggagttcggagcgtacgaaagagaagaaggaaaacgtcagggaaaaagctcactggatttatttaatgaagaggcggcagcagtagcaccgggaagtgacggagtgatcttcctcccatatatgtctggtgagagaactccaatctgggatccaaacgcaaaaggtgtctactacggattagatttcagtaagacaaaaggacacttcatccgtgcggcaatggaaggaacagcctatgcattgaagcataaccttgatgttgcggaagaagccggagcgaaagtagaagtcctgcgtgcgatgggcggatcagcaaactccttgttgtggacacagatcaagtctgacatcacaggaaaaccaattgttgttccatcctctgacacagcaacaacactcggtgcagtgattcttgccggagtcggaatcggaatgtacaaagactttgacgaggcagtgaagcttactattgaagagaagcgttcccacgaaccgaataatgaaaacagaaaagtttacgataaaaattacgaaacatatatagaactttataaacaattaaaggaaactatggcgaaaaaccatgaataagaaataaattaacaaaagatcaaaaaaggaggatcttgaaaatgaaagcagcagttgtatgcgccaacgaagacgtacagtatcttgattacgaagaaccgacaccgggaccgggcgaagttaaggtcaaagtaaaatgttccggtatctgcggatctgatattccacgagtacttcataatggagttcatttctatccaatcgtacttggacatgagttctcaggagatgttgtagaagtaggtgaaggtgtaacaaaggttaaggttggagatcacgtatccggtgcaccgttgaaaccatgtatgaaatgtgatgactgtcagaacggaaacttctctctgtgcaaacattacagctttattggttccagagagcagggatccaatgccgattatgtagtgatcccagagcaaaatgcagttgtatatgatccaagcattccgtatgaacaggcggccatgtttgagcctgccactgtagctatccacggtgtattccagaatgattatcagggcggacagtatgttgcagtactcggcggcggaacgatcggaatgtttacaatgcagtggtgcaagatcttcggatccaagaaagttgtagttttcgacatcagtgatgagagacttgaacttgcgaaacgtcttggagctgacgaagttgtcaacacaacgaaagagaattttatggaagaggcaatggcaatcacaggcggcaaaggatacggatttgtattcgagacagccggacaggttccgactatgcatatggcctttgagcttgcaggaaacaaatcccatgtatgctttatcggaacaccacatgtgaatcttgagttcacaccggcaatgtgggagaacatgaaccgtaaagagttcaaactgacaggatcctggatgtcctacagcgcaccgttcccgggcaaagagtgggatctgacagcacattactttgcaacaggacagctgaaattcgacaagggatttatttacaaaatggttccgatgagtcaggcacaggaagcattccagatgtttaagacaccgggacttgtacagggaaaagtaatgcttgtaaacgaagattaatcagagagggggacaagagctttgatgtgtcaaagctctgtaccgaatatgatacttacagtaacattaaatgcagcaatcgacaaaagatatgttgtggaaggctatcaggtcggtgaagtcaaccgtgtgaaagaatgtgcgtacacgccaggcggaaaaggattaaatgtatccaagccggcgtctatcgcaggagcggaagtggtcgcgacgggatttgtcggaggtcatgcaggaaattatatcgaagatgcactgaaaccatttggaatcaagagcgaattctatcatctggaagaagagagccgatcctgtatcaacatctgggatgaagtcaatcacgtgcagacagaatttcttgagccgggattcacggtatctgaggaagaatttaagggattcgaaaaacatttcacagaactggtgaagaaagcagatgttgttgctatgtcaggaagtgttccaaaaggacttgacggaacagcttatcagcgtcttgtaagaatctgcaaagaggcaggaaagaaagtcatccttgatacaagtggaaaactgcttgagatgggaatcgaggcaaagccgacgatgatcaagccaaacattgatgagatccgtatgttgacaggaaaaagctgcgacaacttccaggacatggtagatgcggcaaaacagattcatgcagatggagtcgagatcgtagcagtgtcactcggtggagacggttcctttgtcgtatgtgacgacggaatctttcgcgcacgtgtgccgaagatcgatgcggtaaacactgtaggatgcggagattccatgatcgccgggttcgctcttggacttagcgaaggactttcggttgaagagacattgaagaaagcaagtgcgatctcagcggcagcagcactcagagaagaaacaggattcttcgtaaaagaagatatggaaaagatctatccacaggtggagattgagaagatcggttagattagataaaaggagagttatcatgggtgaatttattaatccggcagatgtgccaaaagtaaaattctacacaggtgatgaagcaccatgtatcggaatgggaacctttggttccgacagatttacagcagatcagattgctgaagcagtagacggagcaatcaaaagcggataccgcatgtttgattgtgccgcatgctacggaaatgaaccggagatcggtaaagtatttaaaaatgcatttgatgagggaatcgtagaacgtaaagatctctttattatgacaaaagtatggaacgatatgcacgaacatgtcgaagaagcttgcaagaaaagtatcgcagatctccagtgtgattatgtggatatgtattatattcactggccattcccgaattaccatgcaccaaaatgcgatgtagagtcaagaaatccggattctaaaccattcagtgtggaagaattcatgaatacatacagacagtgtgaaaaactcgtcgaagacggattgacaaaattcatcggaatctccaatatgacgattccgaaactcgaagcagtacttccattgatgaagatcaaaccggtcgcctgtgagctcgagatccatccttgcttccagcaacaggaactttacgattacctcgtagcacacgatatccagccggtaggttacatgccaattggttctccgatgagaccggagagagatatgtgtccggaagatgtagcagatctgcagactccggttatgcaggagattgcgaaggctcataactgtcacccggcgatcattgcactgaaatgggcaagacagagaggcgagattgcaatcccgttctcacttcacaattatgtaagcaacttaaaagcaatgacagaagatccgctgacagaagaagagatggcgaagatcgcaacactcgaaaaaggaaaccgccttgtaaaaggacaggtgttcttgtggcatggagcaaaagactggcatgatctctgggatgaagatggagaaatcgtgacattgtaaaaaatgagataaaatgatgttgagagatacagttcttgtaggaagttgagacttttacaggagctgtattttagtagaaaaaaggatcggattttctgcgtgaaataaaaaagttgacatgcacacatttttatgataatatatcgctcgtaacatttttgtaataaatgtaataaaaatgaaaataatgcatagtattaataaagaatagcaattaaatggtaaaaattatgcaacaaaattgttaggagggtatatgaaatttaataaaaataaaaggatgtttctggcgatgtatacagcaatgatgagtgcggtcatgctgacgggatttgcaagttccacggaagcacaggagcagagtgctgtagaatcagaagtgtcaacggagccatcggatcaggaagaaactttagatgacacgcagtctgccggggatgtaggtactgactggtgtgtatcaaaggaagtgatcgatgtacagtcagggatgatcgagaatgtgaagatcgcggcagttgaagcgaagattgcttatgaagcaaagctggaagaagagagacgtgcggcggaagaagcagaacggatcgccagagagaaggcagaagcagaagcggcagcagcggcacaggcagaagcagcggctgcacagcaggcagcagaaaaagaactgctggcatccctgatcttctgtgaagcgggaaaccagccgtatgaaggacaggttgcggttggagcggttgtaatgaaccgtatcaagagttcctcttatccggatacgatggaagaagtaatctaccagtccggtcagttctcaccggcaatgtctggatggcttgaccgcgtaagagcaaaccagggctatacagaggttgcgatgcaggcggcagaagatgcacttgcaggaagcaatccgattggagattgtctgtatttcagtgtaggcggttacggaacacggattggagatcacttatttcattagaatgccccactcacaacatctgatcaaacagaggtgatcagatactgtggaatccttttccgataatctcacttgtattagagatcagaataaatgcctttggatcagtaatcttgatgaaattacgcaggcggacagcctgggtacggttgagcgcagtcaggacgatcgctttgtcctgaccggaataagcacccgttgcgtgaaagacgctggcactgcggttcagctcatgaacgatgaaatcacagatcggttccgggtcgtcacatacaacattaaaatatttggacaaattgaagttctcgataaaggtgtctaccatgaaagaacgaatcgtaagtccgagcaaagaatataatccagttttgatatcgaagataaagaatccggcaatagtgatcaacagatcagaaagcataagagccggtccgatattgaagctggaatatttttttaaaatcatagcaataatatctgtaccgccactggaactgccaatgttgaacaaaatggcagagccaagagccggaagtgcaatcgcaaaacaaagctccagcatcggctggtctgtcaaaggagctttcatcgggcagacgcgctccagaaaagaaagcgttaccgagagcagaatactgcaataagctgtcttagctgcgaatttcttaccaagaacaatcattccgatcaccagaagcgtcatactggcaacaaagttgaaatcaccggctgtcataagtcctgtcttcgcaataagaacagcaagaccggtgataccgccgaaggtaaagttattcgtgaacttgaaaaagtaggtaccaatcgccatgatcagtgtgctgactgtcagtaaaagaaaatgtttccccttgtctaacataaataaattcctccccaaaagaaaaatgatagcttttgtgtgcaacatccaatctaaaaatctgtcacaaatgtttgtacatatgattgtaagcgttgaaaagtgaaaagtcaacgcatgaagttattccaaaaaggaaatactgaaattaagcaaagtacgaaaaacagcatacaaaaatagaaagaaaagcaacgaaaaggaggttttggagtgtggaaccagaagttagaaataagctggatcttgcaatagaaatccgtgacgtttatgcaagagagatccttgatttcgccgggaatccggctattgaagtggaagtgctggcaggaggagaaatcataggaaaagcgtctatggcagggaaaaattatagtaaaaaagagcagacagaaaaacagcaggtgcacatcgaagaaaaaattgaactgcttaacagtcagatcgcaccggaaataatcggtgaaaatgtatttgaacaaagaaagattgatacaattctgaaagaaaacggaaatgaacagacatcctttgcaatatcacttgcagtggcgcgagcagcagcggctgcagaaaagattccgctttacaggtatcttggaggcgtacgtgcggtacatccaagtatgccgcagctgatcagaaaagaagaaattgagatagaaaagataaaagaaattaagatagacgagagtacagttcttacgaaactgttcgaaagaatactgaaagaacagaatgaagggaataaaatgattctcagtcaggaaacagcaggaacagaagacagcttcctggtagatcttgcagttgcagcgaatattacgatgatcttggttgaaaacagagaaagcgcttattatacagtactgaacaatcgattgttacaactggaagagaagattagtggatgaggcaatctcaagagatcaggtagaaataaataatgggagcatagctcccaattatttagcgactttattttacactctctaaatacatttctgtcagttcaacagcatctgcaatacactgagaacatgggacaactttcccctttccagagactccctttagatcacgacaataataggttccgttcttttgacggaatttttctgcaaattcttttgttttcttataggtatctgcttttgtagcttttccattttcaagatttccaatgctgttgtccattccgataaccatcatcattccggttacagctccgcacatgtccatcatgcccatgccaaatccgaatccctcagagattttaaacattgtttcctggtctacaccaaatttctcacagaaagaacaggctacagcctgtgcacagttataccctttgccatgtagttctaatgctttttcaacttttgtactcatttttttctccttgtgtttagaaattccaacttatttctttgatttcaaattgtttttattataatgcccttttctatttatgacaattagtattacggatttcaacagaggaaggtgatgctttgaatgatttctggttactgttcacacgatgtgcgaccagcaacgcatctcgccattttaaatcgcctttggcgatgggcgagatgcattcaagccaaaacatacatcctccgtgtcaatcagcgaagtgattgacacgggagtgaacagtaacgatttctgaacatctcccttcatattattgtgtaaaaagcttgtattggaaggaagatatgtgtatttttatattatatgatgataccaggattgtgggagtgcattgcacgaaacaatccgtaggtatcatagttggaggagtatatgagaataggaattatagaagatgacaatttgttgagaaaagcattggatacatctttgaaaaatcaaggttatacaacgattcttgccggttcgagaaaagaagcaattaaaaatatagatagttctgtagatttgctgatcgtagacattggattaccggatggagatggaataaatctatatcaggagcttcaaaaaaatagaaaaattccagctatttttttgactgcaaaagatgacgaaaaagatatgttaaaagcgtttgatacaggagcagatgattatgtggttaaaccattttcaataagagtattgttaaagcgtattgaagttgtgctaaagagaaaatcaaatgaaaatatttttatgtgcggacaggttatgttatattccgatagaaaacaggtttttgttggagagacggaaatatctttgacactcaaagagtatcagcttttagaatattttattatgaaccagaaccaggttcttacaaaagagatgataatggaaaatatatggggaatcgatagtgaattcattgatcccaacacaattagcgttatgatcagcagattgaaaaagaaattgaatgattcatcgaatgttatcagtaatgtatttggaatgggatatagaatgggagagtagcatggctgtagcaatttttacagtacttttaataggtttcatactcgtaggaagcactgtatatttagttgaaaatcatttgagaacaaatgaaatgaataaaatatataaattgacggaatccttaataaacggcaatgaattagatggttctgatatagggaaagaaacgatctattctaaaacgactaatcaattaatccgtttacaggaaatattggaaggaagaaggaaagaggccgaaaaaagtaaatatgagatacagaaattaatttctgagattgcgcatcaactaaggacaccgctggcgaatataaaaaattatacagaattgctggaagagtcattaaatgaaactcaagaaacattgaatacagaatacataaaagacttgcgaacaagtgaagaacaattatgttttttggtggagagctttataaaaactgcccgattagagcagggaatcatacaagttcacactcaaaaagaaaatcttgttgaaacgattctaaatgcgttggggcaaatacagaaaaaggcagaagagaaagatatctattttcaagtagaattgccagagaaaatcatttgcgaacatgataaaaactggatgtgtgaggccctttataatgtgtttgataatgcagtcaaatatagcaaaagcaacagcacgatcaatatcacaatgaaacaaaccgaaatgttttataagattcagataagagattatggaatcgggataagagatggagaagaaaataaaatttttcaaagattttatcgaggtgagcaggcaagagggcaggaagggtgcggaattggtttatatctttccagagagattgttctattacaaaaagggatgatgaaagcaaaacaaatgaagccagggctgcttatagaagtaaatcttccggtatagacagttcatatgcagcttgtaagaagtttgtaagaggtaccatgtataatagattatggctgagttaaaggtagcatttatgaaaggagtttacagaaaagatggatataatcaaagccatgaatctaaaaaaatatcatacatccgatacatatgaagtgcgtgccttagatggtgtgtcattaacggtggaagagggtgaatttatagcggttgttggtacgtccggatgtggaaagacaacacttatgaacatgttaggaggtcttgacattccggattttggaggtgtctggatcagaaatacaagtttaaaagatctcagtaaggaagaaagaacaatattcagaagaagaaatatcggatttgtattccaacaatacaatttaattccttcgcttagtatacgcgaaaacatagttcttccgatgcgacttgacggtaaggaaattgatatagatttctttaatgagattgtagaaatacttggattaaaagataaattagaacgttttccatcaacactgtccggtggacagcaacagagagtttctatagcacgggcattgttgacgaaaccggcaattgtcctggcggatgaaccgaccggaaatctggattctgttacaagtatggaagtcgtaggattactaaaatcctgtgctgcaagatttcatcagacgacattgatcgtgacgcatcaagaagaggtcgcacagatggcagacagagtaatacgtatgtctgatggaaaaatctatacaagagattgtaacgagtgttaggagggattactatgcttcacaagaacattccaaataacaataaagacataatccgatttctggctaaaaattttgcaggcacaaaaaaggtgagaaatacgattttattttgctcgatcgtaatcggtattgttgctattactatggtattcggaatctcatttggaaaaatacaggcagaagaaataagattaatcagagaaaatggaactgcttcttcggggagaatagaagatggaacagaagaacaatatgcaaaattaaaacaactggattatataaaacaagttggaaaaagtatttttgtaggtgaagctacagaagtttcggagaacaatgcaaaaacgatatgtgatatagtctgggctgactcagaaagctggaacaattttttgagaccggcatataccaatgtgattggaagctacccacagaaaaaggatgaaattctattatctgagcgggcattgaaaaaacttggtatctctgaaccggaacagggaatggaaataaacttagatgtatacaaaggtgtgttcgaacattcaaaagaaaaattcgaattgtgtggctggtatacagactctggaaatgaattagcaatcggatatatttcacatgacaaaattaaagagttgaaactggaaaagggtccttatactttacttttcagtcagagtgatcatttaaacaggagtaaaacagaggaaaaattatatcagacattgccgatgaagagtgcagatcagaagatatacgtttctgatacagcacaatatactgctgtttctaaattcgcaggtggatatgagatggtgatattaggaacaataggaattttgtgtggaatatatttccttgtgcgcaatgtcctttggatatccatgagcgaagatgttcaaaatctcggactgctccacacgatcggagccacagaaagacagattacaaaaatataccggaaacaaatgaggtcactcatgttaaaaggttctgtcttgggaagtttgatctctgcactgattttagtcttattaataccggaactattaggtttccatttttatcaggaaatgggagggaatacaatactttcctttttcagaccgtggattcttttgctttctgttgtgtttgtaaatggaattttgtggatagcatcggaagacgttattagaaaaataacgaagctgtcttgtattgagagtgctgattataacgaaattacagttgccagaaaaacaaaacactctgggaaaatagtaccaagacgttcagaaacaggagaaatgttctatattgcatggggaaatataacgcgacagaaagcacgatttatcattacaagtctttctatatttttaggagtcctatcctttgttctaatgaatgtacttataaatggatgtgattataagcatcttcttgagaaacgtcctgattttttgctggcaggagagtttagcgaattcgggaaaagtcagggatgtggggaagaatataaaacaagagaaatcgatgtggatcctttgctgacgcagggagatggtgtggaactgttgtatgataacgattatgatgaattttcaccaatctctcaagagttggagaaaaaattacacaagatagatggtatcgattgggaaaaatctaatctgatcgaaggagcttatgtaactacagttatgtccagaaagggcatccgtccttatgacgaagggctttcgaatcttacagatgacaatatggtggaaggattctggtgggatactgtgcagattttaaatgaaaatcaaatcttgtcgcttaagaaatacgttcaggataatcaactcaatattgatttgaaatctttggaagaaggaaatggcgtgttgctcatacatgatcatatgctgaccccggaacagcaaaaacttgcagatgaagcaattggcgaaccggtatactttaaaactttgctctcaagagaagatgcgattcgtagaaaagaacaaagtaattctgagaataaagagaaacaacaggaagacgaattccctcaaaaagaatctgaaacatttactctatgtggttatttggatcggcaaaacgatgatttcccggaaataaatcaatcctggcatggagaatgcagcttatactattttatcagtgagaaaggctttcaaaagataccaactgagaaaaagatattaacaatggaattaactgccaatccggaaaaagaaccttatgtgaaaacacagatcagcgagctggtctccgaggaaaataaaaaacgatccgaaatgacagaagtatcaatggatgaaggaaccggcgaagcaggagtttttgttatctgtaaatcagacctgatgcagcaaaaagaaacatatatgagaggaaatcgaattctcttaggtgctgtaagtatcatattattcattgcgggattgaccaattattgtaacgttgtattcactgggatgtacgctcgacgaaaagagtttgacgtaatgaaaagtattggaatgaccgataagcaaatgaaattaatgctctttggagaaggcagttattattttatgtgtgtggtgggattgttatttactgtaggaatggcagctttggttggggtaaagatttatatggaaaataaattgtcatatttcacattccgttggccgattcttattatcgcaggaataatgatatcacttttagtggttaatgttctggttacccattttgttgttggtttttgcggtgaagaaaaggattcgcattgatacgatgtctagacactgtgttttgccttcactttttcatcttcggagcaataagcagcactacggtcacaagaaaatatacaccatacagtaaccaagtaattgtattgttccaagggaaactcttttctggatggttcaatgcaaacattataaatacaatagctataattaacattatcacaccgataatccttgatatactctttttcatgaaaagcacctcatcatcaaactggaattttcttatgctcctgttctattttacaaccacagtgtggacaatattcttcactatttataggtacaacccttaatgatttgccacagaatcgacattgatttttgattacaattatgattaacctattataagttatgccacttcaatttttgtaaatatcatccaatttgcaatacatgcaattaaaataactattcctaaaaatgcaggtactcctgcaaattgttctaaataatttgaatgaattcaatattatgcttttttctccttaaatggcttcagaaagatcacccatccaaagatcagcagattcattaccagtgcaacaggaatatctccccagtggatttgctgattctgaagtacatccgcagagtacgttcctgaaaaaactaccaccatattattattcagaaaatgaataattatcgggacccagatattctgggttttcatataagtatatgccataaaaatccccagtgaaatacaggtaacaaactggcttgccagagccgccagccccatatccggcgtagtgtaatagaagaagtctattggcagatgccatacagcccacacacagcccaaaaggattacgccgccttttagtccaaattttttctgaagaagaggctgaagataatatctccatccgtattcttctccaaagaatgccactactgacaggaaaaagtttaccaaaacagtaaaaaatatgatccaggtagtaggatttgccattattttgccaaattcagaaagctggccgctcagagcacaggcaatcacaaatctgagaagatataatccaataaacaacaggatcatacgaatagatatattccaatgttcgctgttcagtccataggatctgcgcttttctttaccggattgcagaagaagaatccagaaaataacgctgccacctattataacgtactccatgatcggtgcccactgagaatatggcatgctcatcagatctctattttggggagccagaacagaagccgccgtgcagacaaccagcaccgccgtgagagctacaaagaatatgtaaaaagccgttggaagatttttatctccttttttggtaattaaataagccatcatcacacctgctgctggatacagcatctgcgcatttggaaaagcgctgagatcaagaccttttccatagccataccacatcagaagtcccattacatatgtgataccgtatgctataatcacatagatcaaaagctgttttttctctgtttgcataaatttcataattccttccttgtaacttctaatttgttacttacatgatatcatactttagacacttaggcacaggttattctccaaattggagaaaacttaaaacattgatttactgcaaagcataacgaatcttttattaaacaagggcaagatgtgcccttgagtaactctaatttccttttggaaattaggaaaggttgttcttaggaatatttttctttacattcattaatagtatgttatactagaataaatctgataaatttgaaacacttactatagttattagaaatggagttctctatggatttacaaatgatactatttattgctttaatcattattttttttataattccgttactagtatttattattaaatctgcagtaaagcaaggaattttggaagcttacaagattattaaaaatgataaagataataatattttataattctaatctaaaatctagcatgttcaataaaaatcctcttttttaaagagttggatattcttcaattatttcttgttattagttgtataagactcatataaggtatctacttaatagaggaaaagagaattatagatgttttgagggaaagtggctatttttaagaatagatcaatcaactttgttttattgtattttgatacccttgtgttaatatctggataaaaaagaaatgccctaacagtattcttcatgtttatgtgaatatgaattaatctgctaaggcatttctttttatttgtatctttaaaatatcatttaaaataattaaatttttagcaaagtaggtctttttggtaccatatgagacgcatttgtgcaagatttcctccttcttcagatgtttcgaacatgcggttgattacctttttgattacctttgctttttggaaaaaaagaaaaagccttaaaacagcgattttacgcggtttctaagggtttttaatacaggggatgagagaatcgaactcccaccaaaggttttggagacccctatcataccatttgaccaatcccctattcagttgtcgcttaactcaagcgacttgttaagtataccttatggagtgatgaatgtcaagaaaaaaataaagaaaattcaagaaatgtttcaaggatggttctctaattctgaatcaaattataacgcatttatcaaagcgatgctttgggggaatgtgaaagagatgaatacttatatgaatgaagttgcactagctacattcagcagttttgatacaggaagacatacgtcaggaaaaagtcagccggagcgtttctatcatggattcgttctgggacttttggtagaattaagagatcgttatgaagtaaagtccaacagagaaagcggttacgggcgatatgatgtgatgttaataccaagagaaacgccggatcaggcaattataaaaaaggaagaagcgacctcaaaatcacttcttcctttctttgttctcttacagaattccaagatccatcattgcttttttcagaacttctttatgtgcatcttccatctctgtcagaggtgctctaagagttccaacttcttttcccatcatgttaagagcagccttaaccgggatcgggttcacttcacagaagagagcatcaaccagtggaagtgcatctaactgcatcttgcggctacctgcgatatctcctgagaagaatttgtagcacatgtcatgcacgtaagccggagctacgttggagagaacggagataactccgattccgccaagtgcgagaagcggtacaacctgatcatcatttcctgagtaaagatcaacgttgccatcacaaagatgcatgatctgtgcaactgtgctgatatttccagatgcttctttaatacctacgatgttctcaacatctttcacaagtgttgcaactgtctgtggctgaagtccacatcctgtacggcttggtacattgtacagaatcgccggaatatttacttcattacaaatagctgtgtaatgagcaatcagtccgttctgtgttgctttattataatatggtgtaacgagcagaagtccgtcagctccatcttcctgagcttctttggacaactggatcgctgttcttgtacaattagaacctgttccggcgatgaccgggatacggtggttcacacgctcaattgcaaaacgggttgttgctgcatgttcttcctctgtcatagtagcggattcacctgttgttccacagatgacgatcgcatctgttccgcctgcaatctgctcctctaacatctcatctaatttgtcataattgacctcaagattctctttcatcggagtaacgatcgctacacctgcgcctttaaaaattgccattctttttatcctccttcaacatggtgaaacaaagtattactggtcatagcaggttattgcgcataagttccttgtgaacgataattataatagccatgagcagtaactgtttaatatacatctatgcaagaatgcgtaaactgtaaataaacataaaagaaacggcaagatgcgccgtccccaaatatacattatgtataattcagatagctctccatcttgcgatgacagtcatgccgctattcacgtcatgcccaagaacaagaactcaggattcttaccctttcggcatctttccctttccgatgagttcttctgttcctgacacatccgtcaccttacttatgaaaaatgcaacctctatctacgtttccgtgtttaagcaaataataacaccgagggtacaatgatgtcaacatggtttctggatttctttcttatttatagtacccgggttataagtacaccttataaaaattgattataataaagtataaccgattttttgacttttttcttatatatatgatatcattaattcgctagatgtgtgaatgacaaagctgtttcatttgcactttttttatgcttgtatgtttgttttttgaaaaacaatcgcaagaaacgacataagataacaagagaaaattgcgaggatgagaaccgcgattcttggaaaaggtatgtggataggaaggagacctactgtgttaacaatcggtaattacgtgaaagttaagacactggaggaggcttacgagctgaatcaggcaagaaacagtcgtatcatgggcggcatgatgtggatgagattaggaaatgcaagagtgaagacaatcattgatatgtcggaacttggtttgaatgagattgaggagacagaccatgtattccgcattggagcaatgtgtacactgcgccagctggaagagcatgaggggctgagaaaattctatggggacggaattgcagaaagccttcgtcatattgttggagttcagtttagaaatcaggcaacagttggaggcagtatctatggaagatacggattttctgatgtgctgactgcattactggcactggatacatttgtggaattatataatggaggaactgttcgactttctgagtttgtaaacagaaaagcagataaggatattcttgtatctgtgattgtcagaaagagcaagagaaaattccgttacgaatcaattcgtcagacaaagacagatttcccggtactgacatgttctgtcgtaacaggaatttacagaggtcaggagtcctggttcttttcggtaggagcaagaccgatgaaagcggcattgcttgaaaagcagtgggagatcccgaaagatgctacagacgagcagctcacagagtatgcaaaacgtgtggcagcagaatttacttatggaagcaacatgcgcggaagtgcggagtacagacagcaccttgcggaggttctgcttcgcagagagatgcgctcaattttagatgaatataatgcggaggagaaataggatggaagtacagtttaccctgaatggaaagaaagtaagtacagagatcgctgcagatacagtcctgttgaatcttctgcgtgatcttggatgtaagagtgtgaaatgtggatgcgagacaacaaactgtggtttgtgtacagtatggatcgacggaaaatcccgcctgtcatgttctgttcttgcagcaagcattgacggacatgaagtgacaacacttgagggtgtggagaaagaagcagcagaattcggctcatttcttgcacaggaaggtgcagagcagtgtggattctgttcccctggattcattatgaacgtgctcgcaatgttccgtgaattgaagagcccttctatagaagaaattaaagaatatctggcaggaaatctgtgccgctgtacaggatacatgggacagcttcgtgcaatccagaaatatatggaagtcagaaatacagcagttaacattacagtaaagaaaatgggcggggaggagtaagaatggaaagaatagataaagttcagaatctgattcctgagaaaccggaatttgtccacagcaatcaggaaaaaggagaagctatagaatccctgaagattgtaaaccgtcctgtcgtaaagaaagatgctgctgcacttgttacaggaaaaagtgtttatacaaatgaccttgcaccgtcagactgtctgattgttaaagtgatcagaagtccatatgcacacgcattaattaaggatattaacacagcacgtgctgaggctgtacctggaatcgaatgtgttcttacatataaagattgtccggataagagatttacaatggctggtcagacctatccggaaccaagtccgtatgaccgtctgatccttgaccagagagtacgtttcgttggagatgcagctgcaatcgtggcaggaacttcagaggaagcagttaagaaagcgatgaagcttgtgaagatccagtatgaggttcttgaaccggtacttgatttccgtacagcaaaggataatccaatccttgtgcatccggaagataactggagaagcctctgcccggttggcgcagacaacaagagaaatctctgtgcacatgatgtatgtggagatggagacgtagaagcagttcttgcaaaatgtgatcacgtgatcgatcgcgtttatcatacaaaggcgaaccagcaggcgatgatggagactttccgtacttatacatatttagatgcatacggaagattaaatgtcgtttcatctacacaggttccgttccatgcaagaagaatccttgctcatgcactcgatattccgaagagcaaagtacgtgtgatcaagccgagaatcggtggaggattcggtgcgaagcagactgtagtttccgaagtttatccggcacttgtcacatggaagacaggaaaaccggcgaagatcatttacacaagagaagagtctttgatcgcttcttcaccgcgtcatgagatggaacttcatgtacgtctgggagcggataaagaaggaaatattaaagcaatcgatctctatacactttccaacactggagcatttggtgagcacggaccgacaaccgtaggtctttccggtcacaaatccattccactttatggaaagacagaagcatttcgctttacatatgatgtcgtttatacaaatgttatgtcagcaggagcttaccgtggatacggagcaacacagggacagttcgctgtagaatcagctgtaaatgaacttgcagaagttctcggaatggacccgacagtgcttcgtgagaagaacatggtacgccagggcgataagatgccggcttattatggcgaagttacaaacagctgtacactcgacagatgtcttgccagagcaaaagaaatgatcaactgggatgaaaagtatccataccgtgatatgggaaatggaaaagtacgcagcgtcggagttgcaatgtccatgcagggatctggaatctcagcagtagatacaggtgcggttgaaatcaaagtaaatgatgacggattctacagtctgatcattggagctactgatatgggaacaggatgcgatacgatccttgcccagatggcagcagagtgtcttgaatgtaaaccggaagaagttgttgtattcggagtagatacagatatctctccatacgactgtggttcatacgcatccagtacaacttatgtaacaggacaggcagttgttaagacttgtgaatcccttcgcaagaaaatctgcgagcgtggagcagagtatctcggatgcaagccggaagatgtagatttcgatggagaatatgtaacagagctggcaacaggaaagcagatttcaagaagtcagattggaaataatgtaatgtgtttcagtaacgcaccactttccgcaagtgaagcattttcctcaccggtatctccaccgccattcatggttggtatggcagaagttgagatcgacaaagagacaggtgtacttgaactgatcgattacgtagcagtcgtagactgcggaacagttataaatccgaaccttgcgcgtgtacaggtggaaggcggaatcgcacagggaatcggtatggcactgtatgaagatgttgtatataacgaaaagggaaagaacttcagcaattccctgatgcagtataagatcccgactcgtcttgatgtcggaacaatccgtgttgagttcgagagcagctacgagccgacaggaccgttcggagcgaagtctatcggagaaatcgtaatcaatacaccgtcaccggcaatcagcaatgcaatccagaacgcgacaggagtgatcattagagaactgccgatgacagcggagaaaatttacagaggaatttctgggcgttagacttggagtcggggaagaatgaagtgaaataaggaagctatcaactacgataacaacgaatggagttgaatatcgtcgttgatagcttttttacgttgacattgttattttattctgctatagtaaatccacatcaaaatctcagacgtatattttctatatttcatttgtctgaatgtgttatcgaaaggataactttatctcatattcaaggctgtatcagcaggagattccattttgatgagttacaaaataacaaaagaataagaaaccaggaggaagcgtctatgggaaaagcagatgttaatgtgaatatctggctaagtgagaagaaaagatttgcgaatttatttaatggtgtgatttatggtggaaggcaggtgatattgccagaggatttggaagaagtgaatcctgtttcatctgttagtgtgaaaaatcggaccgggaaaacaaaaaacatgaaaaaataccgcgatatcattatgaaatggcgaaatcaggctacacttgtgttacttgcaaatgaatcacaggataaggttcattatgcaatgccgcacaaggtaatgctttatgatggaatggattacgaaacacagattcggaataattggaaaaactttaatgaccgacgaaagcagaataaaaaagcaggtcagtcgttagagcatcttaccgcaggagaatatctgtcgcgatttcgaaaaaaagatcgattgataccgattatttcattagtcttttattatggttcagaaccgtgggatggacctgttgatctgtatgatatgtttcggttggaaggaacgaaagaagagaaagaaattttggagaaatatcttcccaattataaaatcaatcttgtagacgcagaacgattggaagatgttgaaaaattttcggatgatttacaagtgatattaactatgctaagatatagggacagtaaggaagaactgaaacactatattgatgaaaataaaaagttttttcagaatgttgattatgaaacaagtcaggcgatgaaagcatttttgaacatgaaacaaataccaagtgaaacagagcagaaggaggagatggtagatatgtgtaaggcaatacaggaaatgtatgatgatggagtgaaagatggaattcagcaaggaatagcagcaactattagaacgtgtcaaaatttgaatgcttctagaatagagacgtttaataatgttcggaaagagtataaattaacagaggagcaaacagaggaatacttaaacacatattggaagtgaggctgaaacaaataccacgaaaaacagagcagaatgaggagaaagagatgaacgcagtagaagctttagatgaattacagcgcaaagcaagacatgatgataaattaagagaacagttcataaagacaagggatgcagaagatcctcttggaggattctgctctgtatgtcgtgagacgggttatgaactttatccgatggatattgtgcaggcgggagatgaattttatgccgcaatgaagcgcagtacgaatggtggcggagagaattcaccggtgcttacaggagaggatgacccttatgaattgttttttgcaggactacaagaactgtaaaaataattttagtgtataagcattagacataaatgaacagaagtgattacaaaataggaagatttattgatgataaagataattcgcgttggaagagagcgcttacgagaagcgtacgaaattgtgaataaggtagaccaggggatgaacgttccggaatggtttgttgcagaaacgtatgaagaatttgatttctggatgaagaaggaacgaggtcttttatatcttgctgttgatgaagagggcaaggcgggagctatgtttttcgtaattttaccgggcgctcacccggataatctgggatatgatcttggaatggaggaagagaaactgaagctttgtgctatgatggatacggcggctgtattaccagagtttcgagggcactatttacaatataaaatgatgcagcacgcggaaggtgatttgagacagatgggatatcgctacctgctttgtacggtgcatccggaaaatgttttcagcagatcaaatgtcatgaaacaggggtatcagaagatgcttacgaaggaaaaatatggcggattcttaagagatatctggatgaaaaatattatagaataagaaaacaaacatcggaataaacatctgatgtttgttttcacagaaatgcactaatacgttaatacgtgaaaaagataaagcaaaatactgatataatatagaaaaaagaaaaggtgtgtggtatactctcgacatagcctctggcaggattgcagaaatgccgaggcattcctgaatggaaactgatagagatatttaacggcaggctgatgaaaggagcaataaaatggagacatatatgcagatgcttggaagacttgcaaagagtgcatcccgtgaggcagcaaagcttggaacgaaggcaaagaacagagggcttctcgcagtagcgaatgaacttgtagaagagagagaattgattttacaggagaatgcaaaggatattgaagctgcgaaagcgaaaggcgtgaagcagtctttgattgatcgattggcactgacggaacagcgaattgaagacatggcagaaggtctgcgtcagattgcagcacttgatgatcccatcggagaagtgcttggcatgaagacaagaccgaacgggcttcgtatcggaaagaaacgcgtaccgcttggcgttgtcggaattatctatgaatccagaccgaatgtgacagcagatgcattcggactttgcttcaagactggaaatgcggtaattcttcgcggaggaagtgatgcgatccattccaatcgggcaattacccgtgtaatcaaggaaggactccgcaaagagaagttatctcaggatctcatccttcttgtggaagatacaagcagagaagttgtaaatgagatgatgaagatgcatggctggatcgacgtcctgatcccaagaggcggagcgggactcattgcaaatgttgtcgcaaacagtacggttccggtaattgagacaggaaccggaaattgtcatgtatatgttgatgagacagcagacattaagatggcaacagatattattgaaaatgcaaagacacagcgccttggtgtgtgtaatgcatgtgaatcacttgtgattcattccaagatagcagatgcagctttgccgaagattgtaacaagactgaaggaacatggtgtagagatacgtggagatgagagagcacaggcaatcagttcagagattattccggcaacagaagaagactggggaacagagtacctggatgcaattatttctgtaaagattgttgattccatcgatgaggcaatcacacatatcaatacatacaatacaggacattctgaatccattattacaaaggattacgacaatgcattgagattccaggatgagatcgatgcggcagcggtttatgtaaatgcatcaacaagatttacagatggattcgaattcggattcggtgcagagatcggaatcagcacacagaagcttcatgcaagaggcccgatgggactcgaagcattgacaacaacaaagtatattatcttcggaaacggacagatcaggggatagtatagatagcaggttttaaaatccaggtcaattagtgtaagttaaataaacttgtctttgacctggattttatgtatcataattcaagtcaacttatgatttggctataagcttgcctggaattcacaaaattacaatccaagtcaacaatatttctataaaatcacatttcctcccccaaaaagcatcctattaataaaataagaagaaaataaaaaacttataaaaataacaatcagtgttgacaaacagaaatcgaggtgctatcttagtatctgtaaggtgttagcactcaaaaacaaagagtgctaataacaaacaaagatgaacagaaaggggaacacagagatgtctgtagaagctgaattaagtgaaagaaaacttacgatattgaaagccatcatacagaattatctggagactggcgaaccggtcggatcacgaaccctttcaaaatacacagatttgaaattaagttccgcaacgataaggaatgagatggcagatctggaagatcttggttacatcttccagccacacacatcggcaggaagaattccatcagataagggatatcgcttttatgtagatcttctgatggagaataaggagcaggagattagcaaacgagaggatgcacttcttgagaagaccgataaggtcgagaaggtactccagcaggcagcaaaggttcttgcttcgaacaccaattatgcaacgatggtttccgcaccggtcaacagccggaacacattgaagttcattcagctatcacaggtggatgaagaacagatcgtagcagtcatcgtacttggtggtaatgtgatcaagaataagatcattgaagttggagaaaccttaagtaacgagaatctgttgaagctgaatatgcttctgaacacgacactgaatggattatccattgatcagattacattaggtctgattgccagattgaaagaacaggctggtatccacagcgaggttgtcggccatgtactggatgcagtggcagagatcattcatgtagataatgacatggagatctacacaagcggcgcaacgaatattttcaaatatccggagcttagtgataagcagagcgcacaggagatcatcagtgcatttgaagagaaacagcagctggcagatctggtgacagagacactggcaagtgaggagaacaacggcatacaggtttacatcggagatgaaactccggttaagaccatgaaagactgcagtgttgttaccgccacatatgagctgggagaaggtatgaaaggaacgattggaatcatcggtccgaagagaatggattatgaacatgtcatgaagacgctgaaaacgctgcaaagtgagttggatgcgatttataataaagaacccaaagagtaataataggaaggtagaaagctggtgacagagaacatgagcaaagaagatatggtaaaagaagctgttgaagaggcaaaagcaaaggctgcaaaagagcaggcagaagctgaagagacagtagaaacagaagatgcccagggagttgaggctgaagcgaaagaagcaacagaggaagcaactgagactgaaggagattcagaagcagcatcagaaggtaagaaaaagttcttcggaaagaaagagaagaaggacaagaaagacgagaagatcgaggaactcacagaccgcgttactcgtcagatggcagagtttgataacttccgcaagagatctgagaaggagaaatcccagatgtacgagatcggagcgaaagatatcatagaaaagattcttccggttgtagacaacttcgagcgtggacttggttccgtaccggaggaggagaagaatgctccgttcgtagaaggaatggagaagatctacaaacagcttatgactacactggaatccgttggagtaaaaccaatcgaggcagttggtcaggaattcaatccggatttccacaacgcagtgatgcatgtagaagatgaggggctcggtgagaacatcatcgcagaagaattccagaaaggttacatgtaccgtgaaagtgttgtaagacacagcatggtaaaagtagcaaactaatttgatttttaacaagattcagagattagatagaggaggaaatttatcatgggaaaaattattggtattgaccttggtacaacaaacagctgtgtagccgttatggaaggtggacagccaacagttatcgcgaatacagaaggtgcaagaacaacaccgtctgttgtagcatttacaaagacaggagagcgtcttgtaggtgagcctgcaaaacgtcaggctgtaacaaacgcagcaagaacaatctcatccatcaaaagagagatgggaacagattataaagtagatattgacgacaagaaatattctccacaggagatttctgcaatgatccttcagaaactgaaagcagatgcagaaggataccttggtgagaaagtaacagaagctgttatcacagttccggcttacttcaacgatgctcagcgtcaggctacaaaagatgcaggtaagatcgcaggacttgatgtaaaacgtatcatcaacgagcctacagcagctgcacttgcttatggtcttgacaacgagaaagagcagaagatcatggtttacgaccttggtggtggtacattcgacgtatccgttatcgagatcggtgatggagttatcgaagtactttcaacagccggtaacaacagacttggtggagatgacttcgaccagaagatcacagattacatgcttgcagacttcaaggcaaaagaaggcgtagatctttcagcagataagatggctcttcagagattaagagaagctgcagagaaagcaaagaaagagctttcaagtgcaacaacaacaaatatcaaccttccgttcatcacagcaacagctgaaggaccgaagcatttcgatatgaaccttacaagagctaaattcgacgagctgacaagagacctcgtagaaaagactcaggaaccggtaagacgtgcactttctgacgcaggaatcacagcttccgagcttggacaggtacttctcgttggtggatcaacacgtattccggctgttcaggaagaagttaagagactgacaggcaaagagcctagcaaatcccttaacccagatgagtgtgtagcacttggtgcttccgtacagggtggtaaacttgcaggagatgcaggcgcaggagacatccttcttcttgatgtaactccactgtcactgtctatcgagacaatgggtggtgtagctacaagactgattgagagaaatacaacaatcccgacaaagaagagccagatcttctcaacagcagcagataaccagacagctgtagacatcaacgttgtacagggtgagagacagttcgcaagagacaacaagtccctcggacagttcagacttgatggaatcccgccggctccacgtggaatcccgcagatcgaagttacattcgatatcgatgcaaatggtatcgtaaatgtatctgctaaggatcttggaacaggtaaagagcagcatattacaatcacagcaggttctaatatgtctgatgacgatatcgataaagctgtaaaagaagcagctgaattcgaggctcaggataagaaacgtaaagaagcaatcgatacaagaaacgaagcagacgctatggtattccagacagagaaggcaatcaaagaggttggcgacaaagtcgatgctacagagaaggcagctgtagaggctgacgttcaggcactgaaagatatccttgcaaaatctgctccggagaacacaacagaagagcaggtagcagagatcaaagctgcgaaggaaaaactgatggagagcgcacagaaactgttcacaaagatgtatgagcaggcaggtgctgcagcaggtgcaggtgcacaggctggtcctacaccagaagctggtccggctccggatggtttccagggtgatgatgttgtagacggagattacaaagaagtctaaaatatagaaaagatgccggtaagacagaagagaaacaggcagcagggcatcagataaatgaagcatgaagagaaattctacggagctttgtagcttcgtagaatttcttgaggttaagaaagagatacagaaaggttagtatttgtgttatggcagaggcaaagagagattattatgaggtgctcggcgtaagcaaagatgcagatgatgctacaatcaagaaagcataccgccagcttgcgaagaagtaccatccagatatgaatccaggggataaagaagcagaaataaagtttaaagaggcttccgaagcctatgccgttctgagtgacgctgacaaacgtcgtcagtatgatcagttcggccacgctgcatttgatggcggtgccggcggcggagcaggtggattcggtggcggatttaacttcaatggagcagatttcagcgacattttcggagatatcttcggagatatgttcggtggctccagaagaggcggcgcaagcaatggtcctatgaaaggggctaatatcagaaagagcatccgcatcacattcgaggaagctgtcttcggatgtgagaaagaactggatcttgtgctgaaagatccttgcgaagactgtcacggcacaggtgcaaagcctggaacatcaccggagacatgtccaaagtgcggtggtaaaggtcaggtcgtatatacatcccagtccttctttggaaccgtacagaatgtacaaacatgtccgaactgtggtggttccggtaagatcgtgaaagagaaatgtccgaaatgtgcaggtacaggatatacatccagcagaaagaagatcaaagttacgattccggcaggtattgataacggacagagcgtacgcatccgtgaaaaaggagaaccgggagttaatggaggaccgagaggagatctcctcgttgaggttaacgtatccagacacccaatcttccagagacaggatatgcatatcttctcaaccgttgcgatttccttcgcagtggctacactcggtggcgatgtgaagattccaactgtagacggagacgttctctacacagtaaaaccgggaacaaagacagatacaaaagtacgtctgaaaggaaagggagttccatcccttagaaatactcaggtaagaggagatcattatgtaacattagtgatccagacaccggagagattaagcgcagaggcgaaagaggctctgagaaaattcgatgagcttagtggaaatacacttcatcagcatgatgaccttgctacaaaatctgagaaatcagagaaaaaaggcaagaaaaaaggattcatggataagatgaaagaggcctttgaggataaagaataaaaagagaatgatgagagcggcagctgctgactgagaggttggtggctgccgctttttagcatatctagcgatgtaagtcgctaatacgctgaagaatatgatatgggaataattgaaaagcagattcagggaatcaaggttaaatagatgatttatagcaagtttctcttggtctggttttccaaaatcttaacatgtgtcaaacatccagcaaaactcatatccaaaaaaatccctcctagaacatctccttgtatttacacgcgaaatcggatatattagaagatattggaaatgcgttgcacgaagcatccgcaggcatcgtagttgtgggttttgtctccaacatctttacaaatatagcagaaagaaggtgactttcatcgtgaatcagatcgttttgacaggaatggtgctttctgtcgcaccggtgggcgagtacgaccgcagagttgtcatacttacaaaagaacaggggaagatctcagcctttgcaaagggatcaagaagaccaaacagtcctctagtgggagcggtgaatccatttactttcggtgaattcatgatgtatgaaggtcgttcttcttacacaattcagtctgtaaatgtatcaaattatttttcagaattgagagcagatgtggtaggtgcatattatggcttttatttccttgaggttgcgaattactatgcgagggaacgaaatgatgagcgggaacttttaaaattactttatcagacgatgcgtgcgctgacaaatccacatcttccgaatcagttgatccgttacattttcgagttgaaagtgctgacaatcaacggacagggaccgcaggtgttccagtgtgtacagtgtggcgaccggacgaggccggcagtgttcagcgcggcgaagggcggacttgtgtgtaatgaatgtgacggagaagtgagagatggaatgtttcttgacggttctacgctgtatacgatgcagtatattgaatccagtacaattgagaaattatatacatttaacgtgaagccggaagtgctggagaagtttggacgtgtgatgggacggttgatgaagatgtatgtagataaggagttcaagtctctggagatactgcagacattgctgtgatatttggggtattatttaaaaattctcaacaacatttaagacattatgcaattgttgaatcatgaaaaaaatcatgctatactacggttatatcacctgttacatgacagtgtgaaacgagtgcattttgttgtaaatgtaatagtagcagaggaaagaaaagagaaaaatgatggacgagaacatttttatgaaggagaagaaaccgatttctttcgaagactaccttgaatatgatgagaacagcagggggaatcttggaggagaactccctgtgattgtatatcggctattggaatattctataaaagacgagcttgcggtacgttacggaagagcagaacaggttgagattttccgaaatgcgggaaggaaagcgggagaattttttgcacgtaagatgctgaatctgaatcagccgctggatcagtttgtgggtgaactccagaagaagatggcagaaatgaagattggagtactccgtattgaatcagtagacgaggagagcgggcagatcattctgaccgtctcggaagatgcggactgttcggggcttccggtgcttggtgagactgtctgcaattatgatgaaggatttatttccggaattttatctttatactctggaaaggaatatgtagcagtggaaacggactgctgggctacaggaggccgtgtctgccgtttccaggcagatgtaagagaaggtgacagttagttatggaagagaaaaactgtgagatattatttgaatatctgagggatattatatatgattccgagaatgcaaagttggatcttgaacagctggacgaacctttttggaaacttggaaaaggtcttcaatatctggataaagcggtgaaagaagtgaagcattattcagcggagatttcaaagggaaatctgtcaattgaagcgccggggcgagataatttcctctgtgagaatctgaagaatatccatgcgaatctgaaccatctcacctggcaggcaaagcaggtggcgaaaggggattattctcagagtgtttcttatctgggagaattttcagaagcatttaatacaatgacaaagcagttgaaagaacgagaagaggaacttgaagaagaggcttacagagacaaacttacagggattggaaatcgtcatctgttccatgaacgggcggagacgatgcttgctacaggaaagaagattgtcttttgttattgtgatcttgatcatttgaaatatgtgaatgactattttggacatcaggaaggagatcagtatctgaaacattttgtcgatatagtgaaagcaaacattcggccgggagatctctttgtgcgtcttggcggtgatgaattctgtattgtgctcctgaattgttcgaaagaaattatgaagaagaaatttgagcatgtgtatgaagtattctgtaaggaggaagacaatgactatccgaagagcttcagttacggtattacagaactccctgaaagacatgatatagtttctaccgaagagattctgcaaagagcggatgaagttatgtatgaatataagcggaaacataaagagaagtacttaaaacagcttgaaaaataaggcattagtagttataataagtaacattgatgtgcaaggtgaatattttcttaagaaaatgtggataacttctctgaaaatactgaccaaagtgcataaggtatataaataatgtaaatgataaaaaagaatgtgaggaacatacaatggttgaaaagacaatggacaagatcgtagcactcgcaaagtcaagaggattcgtatatccgggttctgagatctacggcggacttgccaacacatgggattatggtaatcttggtgttgaacttaagaataatgtgaagagagcatggtggaagaagttcattcaggagaatccatacaacgttggagttgactgtgcaatccttatgaacccacagacatgggttgcttccggacatcttggaggattcagtgatccgctgatggactgtaaacagtgtcatgagcgtttccgtgcagataagattattgaagattatgcagcagagaatggaatcgagcttgagagctctgtagacggatggacacaggagcagatggcagcatttatcgaggataataacattccatgtccgacttgtggaaagcatgattttacagatatccgtcagttcaacctgatgttcaagacattccagggtgttacagaggatgcgaagaacacagtataccttcgtcctgagacagcacagggtatctttgtaaacttcaagaatgtacagcgtacatccagaaagaaacttccattcggtatcggacagatcggtaagtctttccgtaacgagatcacaccgggtaactttacattccgtacaagagagttcgagcagatggagcttgagttcttctgcaaaccagacacagaccttgagtggtttgattactggaagagcttctgcctgaactggctgtcatctcttggactgaaagatgaggaagtacgttaccgtgaccatgatcaggaagagctttccttctacagtaaggctactacagacgttgagttccttttcccattcggatggggtgagctgtggggaatcgctgaccgtacggattatgacctgactcagcatcagaatgtatccggacaggatatgacatactttgatgatgagacaaaggagaaatacattccatacgttatcgagccatcacttggtgctgaccgtgttgtacttgcattcctttgcagtgcatatgatgaggagaatatcggaacagaagagaaaccggatatgagaactgtacttcatttccatccggcactggctccggttaagatcggtgtgctcccactttccaagaaactgaacgaaggcgcagagaaagtatttgcagagttatccaagtactacaactgtgagttcgatgatcgtggaaatatcggaaaacgttaccgtcgtcaggacgagatcggtactccattctgtgtaacatatgacttcgattctgaggaagacggagctgttacagtacgtgaccgtgatacaatggaacaggaaagagttaagattgaagatctgaaagcatacttcgagaagaaattcgagtggtaagataaataagaaaagcccggactgtagttcacaggtaagcttgtggattcagtttgggctgtttctttataactttaaaatagcatggaagatagaacaggaggagaatgacatggacagaaaaaatgcatggacaacttacagtaaggaagagctggacagattagaacaggtgaatacagaatacaagaactgccttgatgccggcaagacagagcgcgagtgtgttgcactggcagttgaaaaggcaaaagcagagggatataaggatatcagagatatcattaaaaatggagaagaagtgaaagccggagataaactgtatgccgtgtgtatgaacaaaacaattgcgctgtttcatatgggtacaaaaccgctgacagaaggtatgaatattcttggagctcatatcgattccccgcgcattgacgtaaagcagaatcctttgtatgaaaatgaagagtttgcttatcttgatacacattattatggtggaatcaagaaatatcagtgggtgacacttccacttgcccttcatggagtgattgcaaagaaagatggcacaacagttcaggtaagtatcggtgaaaaagaagatgatccggtctttgttatcacggatctgctgatccatctcgcgtcgaaacagatggagaaaaaggctgcaacggttgtagaaggagagaagcttgatcttctgatcggaagccgcccgattgggcaggatgaaacattagaagaaaaggaaaaagaggctgtaaaagcaaatgtaatcaatcttctgaaacaatattatgacatggaggaagaggatttcctctccgcagagcttgaaattgttccggcaggaaaggctcgtgactgtggattggatcgcagtatggtgcttgcttacggacaagatgatcgtgtgtgtgcattcacatccctctttgcaatgctcgatgtggaagaagtagagcacacagcatgctgtattcttgtagataaagaggaaatcggaagtgttggcgcgaccggaatgcattctcgtttctttgaaaatacagttgcagaacttgtggcactgacagaaggggagtctgacctgaaagtcagaagagcgctgatgaattccagaatgctttcttctgatgtgagcgcagcttatgatccgatgtatgctgaagtattcgaaaaacgcagttctgcattctttggaaaaggacttgtattcaacaagtttacaggtgctcgcggaaagagcggttctaatgacgcaaatgcagaatatcttgcaaagatcagaaatgcaatggatgcgcagagtgttgcataccagttcgcagaacttggaaaagtagatgccggcggtggtggaacaattgcttacattatggcaaattatggcatggaagtcatcgacagcggtgtcgcagtgttgagtatgcatgcgccgtgggaagtgacaagcaaggcagatgtgtatgaagcttataagggatataaggcatttgttgaagaaatgagataaagattatgtacttgttgattttgaggaaaattgcatgatgttggtggcggaaacaccatagcaatgatatgtgtaaattgtatattaatcacaaaaaaatagttgtttccaagttcttataaagcatggacaactattttttttgtgcatgttgcacattgtatggagattaatgcaaatatgcaaaatgacagcctgatggacgatgtgtttacaatttgtgaaagataggttaaccaatatgaaaagtatacaaaaagcatttgtaaaaattgtatataattacgaacaaaagacttgactcataagtgtaaaactattaaaatattatatgcgaaataaaattattttatttgtaaaaattattttaggaggtcattgatcatggcaaaatgggtttatatgttcactgaaggtaacgcagatatgagaaaccttctcggtggaaaaggcgcaaacctggcagagatgacaaatctgggtcttcctgtaccacagggattcacagtaacaacagaggcttgtacacagtactatgaggatggcagacagatcaacgatgagattatggctcagatcatggaagctatcgataagatggaaggaattacaggtaagaaattcggagataaagagaacccgcttctcgtttccgtacgttcaggagctagagcttctatgcctggtatgatggatacaattcttaaccttggacttaacgaagaggttgttgagacactggcaaaagcttcaggcaacccacgttgggcttgggactgctacagaagattcatccagatgttctctgatgtagttatggaagttggtaagaaatacttcgaggaactgatcgacaagatgaaagaagagaaaggtgttaaacaggatgtagatcttgacgctgatgatcttaagaaacttgctgagcagttcaaggctgagtacaaagagaagatcggagaagacttcccgacagatcctaaggtacagcttatggaagctgttaaggctgtattccgttcatgggataacccaagagctaacgtataccgccgtgacaatgacatcccttattcatggggaacagctgtcaacgtacagatgatggcatttggtaatatgggagatgactgtggtacaggtgttgctttcacacgtgaccctgctacaggagagaatggtctgttcggagagttcctgacaaacgctcagggagaggacgttgttgccggtgttcgtacaccaatgcacatttccgagatggagcagaagttcccagaagcattcgcacagttcaaagatgtatgcaagactctggagactcactacagagatatgcaggacatggaattcactgtagagcacggtaaactgtacatgcttcagacacgtaatggtaagagaacagctcaggcagctcttaagattgcctgcgaccttgtagatgaaggaatgagaacagaggaagaggctgttgcaatgatcgaccctcgtaaccttgattccctgcttcacccacagttcgatgcgaaagctctgaaagctgctacaccaatggcaaaagcacttggagcatcaccaggagctgcttgtggtaagatcgtattcacagctgatgacgctgtagagtgggctgcaagaggagagaaagttatccttgttcgtcttgaaacatcaccagaagatatcacaggtatgaagtctgctcagggtatcctgacagttcgtggtggtatgacatctcacgcagctgtagttgctcgtggaatgggaacatgctgcgtatctggttgtggtgacatcacaatggacgaagctaataagaaatttacacttggtggaaaagaattccacgagggagatgcaatctcacttgatggatccacaggtgctatctatgacggaatcatcccgactgtagacgctacaatcgctggtgagttcggaagaatcatgggatgggctgacaagtacagaactatgaaggttcgtacaaacgctgatacaccggctgacgctaagaaagctcgtgagcttggtgcagaaggtatcggactttgccgtacagagcatatgttcttcgaaggcaacagaatcgacgcattccgtgagatgatctgtgcagagacagtagaagaaagagaagcagcacttgctaagattcttccagagcagcagggagacttcgagaaactttacgaagctcttgaaggtaacccggttacaattcgtttccttgacccaccgcttcatgagttcgttcctacagaggaagaggacatcaagaaactggctgatgctcagggcaaaacagttgaccagatcaaagctattatcgacagcctgcacgagttcaacccaatgatgggacaccgtggatgccgtcttgcagttacatacccagagattgctaagatgcagacaagcgctgttatccgtgcagcaatcaatgtaaagaaagctcatccggattggaacgtaaaacctgagatcatgatcccactcgttggagatatcaaagagctcaaatacgttaagaaattcgttgtagagacagctgacgctgagatcgcagcagctggaagcgaccttgagtacgaggttggtacaatgatcgagatcccaagagctgctcttacagctgacgatatcgcaaaagaagctgacttcttctgcttcggaacaaacgaccttacacagatgacatacggattctcccgtgatgacgctggtaagttccttgatgcttactatgatgctaagatcttcgagaacgatccatttgcaaaactggatcaggttggtgttggcaagctcatgaagatggctattgaactcggaaaaccggttaatccaagcctgcatgtaggtatctgtggagagcacggtggagatccaagctccgtagagttctgcgacagcatcggacttgactatgtatcttgctcaccattccgtgtaccgatcgctcgtcttgcagcagcacaggcagcaattgccaagaagaacgcttaaatatagttgttagtagattatacatagaagcttctttggaagtacactgaaaagtgaatcataaaaaatagaatctcccctcatatctgatggaatcaattagatttcatttggtgtgaggggagatttttttgactttatattgggaaagtgttatttaggggaggatttggaagcggttcaatgacttgattagcagaaattctattttggtcaacgaaagcgggggaaacgttccccaagaactgtaaaaatacaaaggtggtcaaaataatcatgttacgcataagattaattccaaataaagattatgcagtaaatcagcgagtatgatagaaaaaacagtgaaaatgcataaaaaataaggaaatatactgtaaaaaatattgaaaatataaaaaatattgacgcagaaagttttatttgttatatttgaaataaatgaaccggttcacttttatagaacagctattaatagaggcgatatagggatgattcattgtggaattagtttatcagacggaagaaatgggcatacgatggcagttgagggatatgcccaaattattgtaaataatacaacatttaatacagcaatggtttcggatggttgggataatggagtgtattatcttaatttagatacatcacaatattcagatcttaaaggaacagtttttaagctgtagagaaaatgaaagtcttgaagaaaatttgttgatctatggtttatattttaggttcgtgactatagaaaatagtttgttatgtatcaggatgtggaagagaaagtattttctcttccattttaaaaataaacgtgtggtgaaacttaatgaagaaaaaaataatatatgtcttatgcattttaggtgtgcttttggcattattaggactaaaaaaaagaaatgacacaatgtattcttcgggggtataccatcttaacagaagcgggattgtagaatctatagagaataataatatagttgttcgtttggataaattgaatgaacaagatgaggatttaaaaaatgtcgatacactgcagttagattgtagaaattgtggttatgaattagaaaatctaaaggaaggtaaaaaaattatattttactatttcccatataatgcagacgttcgaccacttaaagtcgagaatatctatgtgataaatgaaaaagagtctaatattgatttgatgaagaaagccggacaattattggatccctatcgagataaaacagatgagtctatttatgcaagaggtaaatccggtggtgttattactacaaaggatattgaacaagctactgaattttacattttagcagggtatgaacagtcagacgctgaagataaggcagtagaatatatgttacaacgcgatgcgacttatcaaagagctattgcagcgggatattctgtgtctgatgatgaaatcaatgattatttagatgatttaaaagttacaataaatgattcgattaatagtgaggaggctcaggctcttataagtcaatttggttcggaagaaggatattggcagcatgaatttgaagtttataagataaatttaccaattgaaaaatatttagaatcattaaaacaagaatatttgaagaatagtatttctacacaatcaaataatcaagaggcagaagaaacaatagaaaattataatcgttatattgaagaagttcaatcagagttagttaaacaagagcaatatgaaatatttgaatgatcaatatcgtgtcaacatgaaagactttcacgtacggttccgtaagaagtttaaggtgaaaattttcttatctacttgattgagaggttggctactcaactaatgcttagcctcctactcgattgccatgaactgccagagaggatacgaaaggggcatgataccccattcccagtcagaagagtggaaattccaaaaccagacggagaaatgcgaaagttaggaattaatcttacaatgtaaagccggcttatgccccgcaaagcggctctgggcttgacattcgattccttatgagtgttaatcaagccaatcaatggtggtttccgctccggaataccggtttccatgttaccggaatctgggtttcttgagttagacaagaatatccaccaaattctaagaaaatagctgatttacaataattcaaaaggtggcaaacaaagcaagaattattaaaaaatgaaatattttatgatcagcgaactaataagagggacgtttttagcgcccactttcttaaagaaaatataaaccatataacgaatttcagaaagacttccctgaaatagaagaatctggagtaaaaatttacacagataaagatggattccagtatagtgtgtctgtccctgattatttgctttggaatggaaatcttgcgatagctgagtcagatgttcgatatgcactaattatttggataaaaccatttcaccaaggaataagtcaaggcgtgctatttaatgactataaggatttgaatactcaaattatgttgtcaagtagcaaaaaagctgaagatcaatggattgttgatgaaaatagcacaatattgattacgatatttgaaaaagcaaataaagtatggaatctgggggtgaaataaatgaaagtaattaaaaacttatgtttgttttgtttcctgatttttggaatacttatgcaatctgaaatatttcaagatcagctttggaacttttctacagcatattttacgtcatcacgctatgaagttgctagtgaagatatgtcgcaatttctgaaagatgtatcagaaactgcaacggagaatgatgtacatattttttctcagcacaatgaaatcaataataaatacctttcaacacttcatatttatggcgatgataaagtaatcagacaaacattaaaaaatactgcaaacatagaagaatcagaatataccgctttagtttccggagttacgaaagtaaaatttcataatctctcagaattgcaaagtacctctgtgggttatgaaaactttatatcatacataggaaatgaggacaatattatctctgcatatcagaaattatcagaaaaatatagcttgacttatccagaatattggaattctacggaaaaggacatgatttttattatatggggtatgattattgcattgatgattgttctaaatgtaattgaagtggttaggcgaaaaaaagaggttgttgtacgagtttccttaggagaaagtgctggtttcatagcatttaaggctgctttatttgatgttacttttgacattacattatttattgttgcaaaaatattgctgtcaaattatatatcgggagcatatgagaatagactcgtcacaattttatattccattggaattattctttccactattccatattgttctttttgcttttttgatattagaaaggcatttgcaaatgcaacacacaaaagaggagtggattttttaagttattcgttaaaatttatagcaggggtagccgctgtttttacaattaccactaatattagtagtattcataataacctatttacaaatgaacatttgttagaagaatattatgatgcaaattattttaccgtaaagactactgattttaatgctgaaaaagaagaagcattttggaataaactatacaagaatgaatataacacattaaagcctgtaatatgcttgaatattttaaatgataaaaatgatgtgatatatgtaaataatcatgcaaaagatatgttacaaggttttacgaagcagataaatacagtagagaatgaatcttctgatttgattattttcattccaaagaatagatattttgctaaaaacaagcaattagcctatgactccttgagccatgttttaaatcatgataatttacaacaattaaatattcagtacatagagtatagcgaaacagaatacttttcctatttagatacaagtggaataaacggtatcgaaaaaagcaaaaatccgataattatttatcaggcaaacaaagatttagcagtcaatggtgggtatcttgaaagctataaggcaggagcagttttatttcaatgtgatgaaaaacagctaagaaatatcagcaaaaagtatgaagatatgcttggaaattatcagctagtaattacaaacgtacatgaacagtatttatataatcacacatttttaataaaactcgtgggatttttaagttctctttgtacgattgtattgcttttaaatattacgattattgttaccgtaagtagactagagtttcgagaaaatgcaatgaaaatttccttaatgaaaatctttggatatagtttatttgaacggcacaaaacacttcttaaaatgattgtagtggaaaattttgtgatattagtaggtatgcttatctattctttattatcggtacaaactgaagtaggaattagcattcttgttagttcatttatggcactaatagaatttacaattattttctttaatatcacaattgttgaaaaaacaaacataccgaaatcattaaaaggaggttgcttatgataacaattgaaaatctatgcaaagcatataatgataaaattttgttcaaaaattttcatttgaaaattccagatagcagttttttggtaattagtggcgaaagtggatgcggaaaaagtactttacttaatatgattggaggtattgaaaatcctgacaaaggttctattattgtgaatggttttgatgtggcaaaaaaaggaaaaaagcagaaatatttcaaagaagttgttggatttttatttcaaaattttgcccttttggaaaacaaaacagtaaaagaaaatctagaaataataaaaaaatcaggtagaacggatatttcaataaatgaagctcttgaaaaagttggcttacagaaagtaattaacaaaaaagtctatcaattatctggtggcgaacagcagagagttgcgttagctcgtttaatgctaaagaaatgttcaattgtattagcagacgaaccgactggttccttagacaaaaaaaatagtgagattgttatgaatatattacatgagttaagtgaacagggaaaaacagttattgttgtaactcatagtgaagaaattgtagcacaagaaaagcatgttctatatttataatacccataatagaagaatatgttctttcaggagacaactcctctaagaacatattcttttggttaaaattgattataaagatacttttatttcagtatattcgctatattgatgggatatatatttgcatattagagagaaaagcgagttaaatttttcttggcaatcctgaaaaatatcgtaagtaggtaatcatccgtattacctacttacatcaaaagaacaattttagcaaactatctaaagttttctacatttataactctggaaaaacaatcgcacaaattcatgttatgagtgaccatgattatagtaatgcctttttcatttaattcttttagaagtttcatcactatcaattcattttctttatcaagtccagaagttggttcatcagctaatatgacctgacttccttgtaaaatcaatttaataattgcaattcgctgttgctctccaccgcttagctgatatacttttttgttaagcatatcatttagctcaaactgctttaaatacttattgattagttttagtttttcttctttttttatttttttatattcaagagctaattttaaattccataacacgctttcatcttctattagcccataattttgaaacagatatcctattgtatatcttctcaaaatcatagcatttttactgttcatggataaattttgatgactatcaataatgattgtgccctcagatatatctgtaatcaatcctattatatttaaaagtgttgttttacctgccccgcttttccctacaagtcccacaaattcgcccttttctatttctaaagataaattttcaaatagaacctgatttttcccatattcttttttgacattttttaatgtaatcaatgacatatttatgcccccttttcaatctcatataaagcatttgagatataaactttataaagcaattcgcagaatatgtagtcaataagtataatcgcaaaaaggcaagcaaaataatagtttataacagttaatacgcctgatataatgagttcaattcctaaaaaaatataccgatttttcagtattctaaaatgcgagaatcctaaaatctcttttgccgcatatctctttcgatttacaaaaatatccacataatttgaaatatacaaaacaaacagtaaagacactataaagacaatcgtaaacgtagtgagtgttttaagaacgaatgtcacattttcaagttgcaataaataaggtgtgagtaatgttccggctgtaactaattgctctaaatcatattctgataataaagaagaaaaatcttctcttgactccatttgaaaaaatagacatcttgtatttaaagagtccaaatagtaaagtcctgcaaaattgcccgtatcaacaatgataataggattaaccatatccgaaaaaccattctctgcattaacttttattgtagaatcatcgtctatataaacgacattaaaattatcaatagttttttcttctcccggtattccataaaattgattgtaattcattaatcggaaatattcttgtttaatatattcgctacatattcttttttgacattttttaatgtaatcaatgacatatttatgcccccttttcaatctcatataaagcatttgagatataaactttataaagcaattcgcagaatatgtagtcaataagtataatcgcaaaaaggcaagcaaaataatagtttataacagttaatacgcctgatataatgagttcaattcctaaaaaaatataccgatttttcagtattctaaaatgcgagaatcctaaaatctcttttgccgcatatctctttcgatttacaaaaatatccacataatttgaaatatacaaaacaaacagtaaagacactataaagacaatcgtaaacgtagtgagtgttttaagaacgaatgtcacattttcaagttgcaataaataaggtgtgagtaatgttccggctgtaactaattgctctaaatcatattctgataataaagaagaaaaatcttctcttgactccatttgaaaaaatagacatcttgtatttaaagagtccaaatagtaaagtcctgcaaaattgcccgtatcaacaatgataataggattaaccatatccgaaaaaccattctctgcattaacttttattgtagaatcatcgtctatataaacgacattaaaattatcaatagttttttcttctcccggtattccataaaattgattgtaattcattaatcggaaatattcttgtttaatatattcgctaatagaattttcatcattcttatatttatgtggaactaatactgttggttcactgaatatatcttctctcaatggttttccactgaactggatattggaaaattcactcagataatttctatttgcaataacaagctgttgctcataataggggcgtgatatctgcaaaccatcgtttatcctaaaatcacatagtagtgaatggttatgattatacatctctaatgtttgttttgaatagttttctaatatgtctgtgtttgctaacgcataatcatactccaatgagttaaaaccattagcggtataatatccgtccagatacttataatctaaaacagctagttggctttgtctaaatgagtttccatgcttaagtaatgaaattatagtaatagcaattattaccgaaaaaattatttttatagtctgaactacaatatttgtgccgctatttaaagtcttatttttgatcattgcctctaaagaaacaaacttaattaaaatacttgtaattaaaacacaaagtacatttatagttaaaacacccataaagaacagtacaattgttactaaataagaaaaatcatatctgtttgttaatgcgtaatataaatttaacaagaccagtaatacgaaacatgttacagaaaaatattttattatacttgtaatttgttcctttaaaatatgtatagtagaaaagcccatgctttttttaacacctatttttttcaaactataagatgtgtaaatacaatatatgatttgaagtacaataaacaagattacaaaattcagaagattcaattctaataccatactatacggaatagcgtcgttttcaaaggtatttattgtgacggacagttgagaagcaatctctttgattgcgttaactggtaaatctgtatagaatacaccaatactatctaaaaaatcttcttcttgtaattcatgatattgaaacaaaatagaggaagatataggctgtttttgtgtaaactcatttaatggatagcaatataaatcataaacagatttatctgttgaagtgagcgtattgttaatgagttctaatttattttgagaatatttttctgtaaatattgtatagaatttgtcgagaatttctggcgatgtttcttctaaaacatacccttctaacttctcagtagcaatattgttcttttcgtaaatgttgtagattgaagtattaaaaatatatgctaaaagtataatttcaagaaaaataaaaatcttcaaaaaatttttcaaaatatacaccattcctttgaaaaaatttacaaaatgagacggggcaaccagcctcgtcctaggtgtttacagtagttcagtatggagaatactcataatgagatgtttcgtttgcccactgaactctcttgtcaactacatattaaaatatttttgtataatggtatttgggggaattttcttacaccaatatagtaatctaaaatttatttgttgaaaaattttgcaaataaatgctaattaaatgatgtatcattatttatcttttagaatgctataagcttctaaaatgccttttttcacgccggttttgatagcaaaaattaatattggaattattataaaaataaacaataaaataataagtaatatcatttgtatatccataagatacctccagtaatatataataatctctcgaaatctctaagccagcaaatacaaggctttcaggtttcttttttattaaaattccccatttttttgctaaaagcacttgacaacttcatcgaaaaatgtggcgcctattgatcaataagaaccgtcgcttacggcggcagatatttttcgattggaggtgattttttatattacctgttaactgtggcagccatgctgactatcaacattttgttgttactaatcttcgtaaatatcatcctgatcctgatgcttttgcccgctctatatgggatattatcgagcgtttctagaatctcgagttatcttttaccgatacttttatggctaataaatattctaaattcggattagcaccaagaacgccttcctgtatgcaatgttcttttctgctttccgttgactttaaagttacctcgataacagaataggctgcataacttaaaacccgggttaaaatgcctaaaacaaaaggcacaaaagctgatactgtgaaaaaagttacggttgacgatcttcttcctgttttagaaaatactgactttaaactagacgaacagccttatccttctctatttgcaatctatcagaaagcgttccgtgatatttctgtatccacaggacttatccattcggatgctttggctttagccggtaatggaatgcctgttgtaacttcccacagggaaaggaaaaagcgtatctgtacatgcttgttgattcacaaagttacttatcggtattttctcatttttgctgtgcttcaaaacatgattcacatggattcctgcacgcttttttcaagatgaaatcttttcttcctgattatactgtttcaaaagtacttttggattctgcacatgatgccatgtcttattatcaatacttcaaacgcgagaatataacaccatttatcgaccttaatggaaaaggtagaagacctcccatttataaaaacgactttattattgataaagatggtgttcctatttgtctttctggatatcgtatgcgtcgagatggtattgaagttgctaaaggcagaatgaaattcaaatgtcctaagatcagttacgccggtggcggtatctcctgtacatgagaaaccccttgttcaaatgctaaatacggacgtacagtccatctagttctgaaagataatccaagattgtttaataatccatcaagaagtagcaaggaatggaaactggaatacaatgcaagaacttctgctgagcgttctaacaaacgcgagaaattagatttttaaattagaagacggtagacacagctcaactaagatgtggtactgcagcctctatcacatcctgatgttacagcatctagatgcatgggatttgccacctgaatcaaccctgaaaaaatgattttgaatatagcataatcctgtagattattatatctcattttttgaaacatagcgacagttatgtttatttcttgcgttcatttttacgttcaagaataatatttacttgtcaaagttcaatgccagagttttgatggcatgatcactcaagattccgagagataattatactgtattgaatgtttacaagtttgttttcattgtaacatattatttataaatgtaaagtaaatagacaagaaacctctgaaatttgcaagctgtgtctgagcatccacagcacaggcaaaaaatcagaaaattcactgtttacaggaaagtagtttgatattataatatactcagatcattcaattattacattcgcaactttcattcttttgtttttcttaataatcatgtacaataattaaataaacagttgaaaaaggttatatatgttagatgtttatgtttgtgaagataacaaaatacaattttgattgaacaactagatatgcaactcgcttgtgcatcaacaacttctggaaaaattttagaacaagcaaaaaaatcagaaaacacaggggtattttttcttgacatttgtttgcaatcagaaatgactggattgattttggcacaagaactaagaaaaattcaacctagatgttttattatatttatcacaagccattccgaaatgagcattttaacatttcaatataaagtagaagcactggattttataatcaaagattcctcagaaaatattagaaaaagaatacatgaatgcttaatggatatcaacaaaaaaattttgactgttaataaaaaacaacaaaaaagtattcttattactcaaaatgacagattgattgctgtagactatgatgaagtgttattttttgaaacttcagaaaacaaccataaaataatactgcatgccaaaaagcgagtagttgaatttaccggacacttaaaaagtgttgaagtacaattagattatcgtttttataggtgtcaccgttcttatattgtaaatacagataatatcaaagaagttaattttcaaaaactaacaagttatatggaaaatggagaaatctgtccaatctctgtccgtgccaaaactagctaaaaaaaatattataatgagcatctaatatcaataggcaacactgtgactagaatatctaagaaatgcaacaatgagtgatgttccgtatttgaaagatgttgataaaatatatacaacgttgagtgataagaaatatacagaaaataataaccgaaagtggtttgaaaagaactatactaaagaagtaagagcgcaaataaaagatctcaaatatgctcctaataataaaggatatgcgcaagactatataggaatatcgatatcggcgaaaaatgtaaatgctatcaagtacgggaattcatggacatgcagcacaacttaaaaagtaaaaaaaattttatattgataattgtgtctttttggatagtaatgtcaatcatatatcataatttctggtatattgacttggataatataggggaaatgaagcctgtagagtctataaaatcttcaaatggagaatatgaagtgattgtatcagtatggtatccaaatagggatgaaaataattactatattcattgtgatgcaattaaagtagtagcacttcctgataaaagtgagctcatatcggattggaacagtcataaaatttactggcaaaaaatagagggaacgtataatggcgaggaaattcctgtaaaatggatcagtgaatataaaatcatgattaacgaacaggtaatagatgtccggggaatcggatatgattatcgctggtattctaaaaagtggaaataatttacattagcagggactgtgaaaaaagcataatcccgaaaaaagaagaaccaagggtttattataaatctcaaggttcttctttctgttataattaacttgtgatggaaattaataacataatctattctaacccaaaacaggcagttttgccaatgctaattcaagattatctggacatctatgatccagtgctgacatttgacagatttatgggagaaatcgaactggagaaatatctgaaaaatattccgcaacattatacaggaagactaagatatgacccggtcagcatgctgaaaacagttttgttcggatttatggcgaatggctatatatcattacgtgagctggaggagcagtgtagagtcaatctccgcttcatgtatctcatgaatcatcaaacaccttcttatcgtaccttcggctacttcattgacgagggtgtaggatataaagcatttcctcgtaatgttctaagaattttttgtaatttattcataagactattatgaatgaaaaataactaaaagaaaacccctaatcccctcaagaatgaggtcctttttcttttttggagagcaggtggatactatgcagtttttgaggagtgtggtaaaatgtgattgtttatcatgttaggagattaggaaggtagatgaaatgaggacaattttgttattggaagatgatgagaatctgaaccgtggaatcgcgctaaaactgcagaaagaagggtatcaggttttttccgcttttcagatttcagaggcagaaaaattgtttgatgaaaatagaatagatctggtaatcagtgatattactctgccggacggaaacggactggagttttgcaggaagattcgaaataagagcaaagtctttgtactgtttctcacggcaatggattcggaaattgatatggtaaacggctatgatgcaggggcggatgattatattacaaagccattcagcctgatggtactggtttcaaaagttcaggcatttatgagaagaatggaaggagtctgcggacacaacagaatcttatcgggaaatatcgaagtaaattatggagaaatgagagcgttaaaacgaaatgctgatggagtgactcctttgacattaagtaaaaaggaacttcagataatgatttactttatggaaaacgcaaggcagattttatcaaaagaacagattttagagtatgtctgggatgttgacgggcagtttgtagacgataatacagttcctgtaaatatcagccgattgaaaggaaaaatcgggaatgattatatacaaaatgtaagggggatgggatatatatggaccgaagaaagcgtacaggagtagctctggcagcagggctgctttttctgtttgtgacagagatattgttgctgtttctggcaggaaatagtttatacaaggaagagcaggggaaattaggggcgttagtgctgtcccatccggaacaggagacggagtatatagagttatttgacagaggaaagcaaagaaatcgtcaggaagaggaagcggggaaagagctggaggagcgttacgggtatactccttttgatgggagaagcgtgaaaacttttgctgcatatggaataggaatggcgatggtttttgtggcaggacttggagtttcatgggttttgtttttgcgaaataaaagagaccggcagcaagatgaaaataaccaggaagaacttcgggaaaaatatatagaactgcagaatcattttgaaaaagtaagagaaaaactttccagagaagaaaacaatacaaaatctttaattacagatatttcccaccaattgaaaacaccgattgcttcattgaagatgagttgtgaactggcggggtctgccgatttaacctgggaggaacgggaagaattttataaaaaggaatgggatgaaattcaaagactggaaaatcttttggattcactgattcatgtgtccagattggaatctgggatgattcagattcagccagagatgggcagtctgaaaaatacattggtacaggctgtaaacagtgtgtatatgaaagcgtatgaaaaatccatagatatttctctggatgaatttcaggatgtgcaaattgtacatgactcgaaatggacaggagaagtgttcgtaaatattttagacaacgcagtaaagtattcgccggagcatacagaaatccgaattcgggtaacagagcttgctacctgcatgatgctggaatttatcgaccagggaacaggtattccggcagaagaggcgcatcgggtatttcagcgtttttacagaggaaaccaagagtatgtaaaaaaacaggagggctctggggttggactttatcttgccagaaaaattttggaggagcagaaaggcacgatttgtgtaaaagtagcacctgaaggcggtaataattttgtggtgacattaccaaagaaatagatttctgaaaaaaagatttcttacaaaattgttatgctttttgtaagcctactgtaagactggattgatagaatgacattagcaaagaaaaaggaggcttcaaagtttatgaaagcaatattagaaacaagagatcttgtgaaatattatggaaaaggcgataatttggtgaaagctattgaccatacagatttaataatcgaaccaggtgaatttacagcaattgtaggacgttctggatcgggaaaaagtactcttcttcatatgctgggaggattggaccgtcctgattccggaaaggttttgatagaaggaagagatatttttaaactgaaagatgaaaaacttgcagtgttccgcagaagaaagattgggtttattttccaaagttataatttagtaccatccttaaatgtttgggaaaatattgtgctacccattggattggatggaaagaaagtggatacagagtatgttatggatattatctgtagaatcggaatggaggataaattgaaatccttaccgaatactctttctggtgggcaacagcagcgggttgctattgcaagagcgttggcatcccgcccggcgattattttagcagatgaaccaacaggaaatttggattccaagacggagttagaagtgatttctatgttgaaatcctgtgtttcagaatatgggcagacactggttatgatcacgcatgatgagaccattgcgcagatggctgaccgtatgattgtcattgaagacggtaaggtggtgagagcatgaaaacagtaacaaaaacagcgcttgccaatgtaaaacagaacaaaggaagaaactttttatgtggatgcgccattgcactgactacgtttctgatatttgttgttttaacggtgggatatggaatgatccgcgtacagcttgcatcggtggatgcttattatccaacttaccatattatgttccgccaagtttccgagaaaaacaccaaagcacttcaggtgcataatgatatagaagaaattggtctgagaatggatttgggacagattatagatgatgatgccacaatcattatgaccgctatggataataatgggattcggttgaacaaagcggagttagaagaaggaactttcccaaaaaatgaaaaagatattgttgtttccaagggagttttagaggaactgggaattcaggggaaattgggtgatgaaatcacgattccataccaaatttacgaaaaagacggtatgggatatgcgaaagaagacactttccgcatctgtggctttatggaatcttctgatttgaataaagaaaagaaaatgtattttgtgatgaattccatggaatatgcgaaacagatgataccggaagcagacagagaatatcgtgtgatgttccgtctggcagatgcagagcatatgacaacagatgaaatcgaagagaggggaaaagaaatcggagaggattttggtgtacctgagggaaatgtggtagaaaacagagagtatttggttgcaaattatacggatccgtcatttgtaaaaggaatgatcgtggtaatcgttatggttgttttagcaggaatcctgactatttacagtatttattatgtgtctatgataccaaaagtacaggaatatggaaaattaaaagccataggctccaccaaaagacagattcggcagatggtattccgtgaaggaatgctggttacggcgcttgccctccctgtaggattgcttatcagtagtttcctgtccagatggattatgaaacagatgattacttttatggcaggcgaagaccctctaatgcaggtagcagcagaacttgtaaaaaatggtgaggtatctttgctgcactggtggatttatgcgattaccattatggcggtactctttacttccgcagtttctttggcaaaaccgatgcgaattgctgccaaagtttcgcccattgaggctatgcgttatcaggggttagaaaaacgtgggaaaaaagtacggaaaggctatcagaatctcacgatttttcgtttgacaaaagcaaatatggcaagaaataaaaagaggactgggattacgattgttacattaggagcaactggtattctgttcatggttgtggcaactattttatcttgcgcggcaccgaaagaaattgcaagaaaggatattgaatctgattataaaattgaattggaaacatggggtggggacaaaatgaatccggacagagactggagacaggttcagcagaataaccctttgacgaaagcgtttattgatcaggttcgtgatgtagacggtgtggaagaggtaaaggtaaaaacatttatgaatggcgaaattccgaaactatctatggatggtgaaatttggggcgcggatattattggactggatgcatcttatgcagaaacgctggaaaaaggagagatacaaggacatgtgacatatgaagaattggaaaaaggagataaaatcctcatgtctgctaatatgctatactggttcccggaactgaaagtgggagattccttgaagatggttttgaatatgggagatgatcaggtagaaaagacttttgagataggagccatcggagattactatgaaagccttggcggaagttcattttatctgccccaatcagtgttggaaaaaatgaatcccaataatctgaactacacactggaaatcacagtgaatgatcagaaaaagaacagtgcatatcaggaacttcaggcacttgccgacaacagtgaatacctggtgacaggaagttatgaagagcaacttcagaagtgggaaaagaatatgcggttgatgagcgttttgtgttatgcatttctgattattctgggtggaattggaatcatgaatcttgtgaacactatgatgaacagtatttacacaagaaggcgggagcttggaatgatacaggcgataggaatgtctgaaaaacagttgatccgtatgctgcaactggaaggaatcatctatactttgggaacattggcagtttctgtgggcattggaagtcttgtaggatatggtgcatttctttatgcaaaaaccaaacacatgtttcagatcagtgagtatcattttccagtggtcccagcagtgcttttgatttgtgtggttgcctttttacaggtactgctcacatatggagtatctgcaaatttccgaaaattgagtttgattgatcggatacgatatgcagagtaatatattaaaaacatcatatatacaaagggaaacgctataaaaaaacagaattgcccaatatgattaaaaggaccgccgtgccataaagaaatcccttctaaataaacaagattttattatttctcttgtctacttagaagggagcatatcacagatgaggaagtccacaggtttttactgaaatatttgtggaaactttctaacgatgatgtgattttgtgaaagtgtactacgatcgattagtgagttttttaaatataagatgatgtgaagtctttatataactgaccctctcgatatttttcgagattaggtcagttttttgtatgaaaaaaatctgtattattattccctgtttttataaataagactttctcgagaagagagttcgaccatttcaccgatggaaaacgcattcacagtaagtaggtaatcatctgtatctgttagcacccatttttttctgatacactcttttcataacaaaggaagaaaactgtatcattaagcctgtaaggaatcctgagagggaaaagcctaagtgggaggatacaatcacaaatcgaatgctgcactggtcatatacgccggagcagaaagaggaagtgaagaaggcacttgcggcaggagttccgaaggcaacgattctgacttatttctatccggaggttactgtggagaggatgagttcatatcggaagaagcagtaaatgttatcgcataggcacaggaaatgtggtatactgtgcctatgtaaaaaagaatgtgttctacaaatcggaagttataggaggtgaatcagcatgaaatgtccatattgtggtgaagaaatgataagaggatacctaatgagctcacgagatattgcttttgcagttgatgatgtgacaaaagtaaaattttttcgtattagaaaatcggatgatttggagttgagtaaaggttcaggcggaatccctcattgtgaagcttatcgttgcagtagttgcaaaaagattttgattgattatgcaaatagataacttcaagtttataaaattaagaaagtggaatttaaggaggagtatgtaaatgaaattagcagatttagcaacaggctctgattggatagtgtggattgtctttgcgatatttgctgtactttctattattttactttctggacatggaagctggttcatttctggatataatacagcttcaaatgaagaaaaggaaaaatatgatgaaaagaagttatgcagaacaatgggaattggaatgtctattatagcaattcttgcattaactatgggcttgtttgaaaatattttgcctgcattttttgtatatattgcattggggattattttggttgatgtcgtggtaattatcattttaggaaacacactatgcagaaagtaataacttcaagtttggagaattgagaaaatcgaagtttgtaaggaacagaaactttgaattttgggaggtaatgaccatgaagaaaatattaatattgttgctatgtcttttacttacggcctcaatcacgggttgtggtacacagtcaataaagccgattgacacaattgaaggaaacatgaaaacatacagtgaaatgtcagacggtacatggcagtgcgatggacatatctacaaatacaggttggaaatcagtggacgactgagtaatgccgttaaggacagcacatacatttatttaagcaacatagaagatattaccttcgaacaagcttggaaagcatctgggcttagcagtaatatggatgattactttgatattgacgaagcagtattggttgaattaccagactgacaacttcaagtttaaggaggcagttgtggcttttgattttaagaaagaatataaagagttttatatgcctaaaaatacaccagcgattctaacagttcctaaagcaaattatattgcagtcagaggaaaaggtaatccaaacgaagaaggcggggcatatcagcaggcaattagtgcattatatgcggttgcgtatactttgagaatgagttacaagacagatcataaaattgaaggattttttgaatatgtagttccaccacttgaaggattctggtggcaggaaaatatacatggtgtaaattatgcagataaagattcatttaattggatttcagttatccgcctgcctgattttgtgaatcaaaaagattttgaatgggctgttgaaacagcagctaaaaagaaaaaaatagattgttcatcggcagagtttttgaccattgatgagggattgtgtgttcaaataatgcacttgggggcatttgatgatgaacctgcaactgttgcacttatggatgcttatttggagcagaatggatatgttaatgatatgaatatggaaagattgcatcatgaaatatatctgtctgatgcaagaaaggttgttccagaaaaatggaaaacggtcattagacatcctataaagaaactgtaaactcggaagttatagtaaaggaggtttacaatggggttttggatttttatgttgattatggatttgcttcttccatttacgatgattggttttggaagatattttatgaaaaaggctccaaaggaaataaattcagtttttggatatcggacttcgatgtctatgaagaataaagacacatgggaatttgctcataaatattgtggtaaagtctggtatgtctgtggaatggttatgttgccgataacagtaatattcatgcttttagtaattggaaaaaatgaagattgtgttgggagtatgggaggtattatctgtggtgttcaacttattcctttaattgggtctattctcccaacagaaatagcattaaaaaagaattttgataagaatggaacaagacgataaagtttgcagaatcaagaaaatcggaactgataaaggagaataatcatatgcaagatataaaaaatgaagaatatgttacatgccctcgctgcgagaaagaagtctataaggatgcaataacttgtccgttttgtaactttggtattatggcatggcttgaaggagagattaatgagaatggagagtcagtgaaaaagagttctaagcaaaaattttattgaccaagaaatttaggaggatttataatgagcgaaaaaacagagattactttcatgcaaacaagactaatccggcttgcttcagaagagtggcatttatctgttgaacagattatctacttgtttaaagaagctgatgtttttggatatatagaaaaatgctatgggatttttcattgtgagggtgatgaagctgtgcttgaagacattacagaatttctggaaggaaaggggataaagattagtgcttgagttaaaagatggatttgttctctatcatggaagttattgtgaagtaaaagagccagatcttgccaaatgtgcaaagagaaaagattttgggcagggattttatttaaccacatccaaggagcaggcagaaagttttctgagaacctcaatagccaaagcaatcgcaaccggaacaattgaagaaggacagaagtttggatatatttcaacttttgaattcaacctttcaggaaatcttgaaacgcatatttttgaaaaggcagatgtagactggttacattgcattgcagctcatcgaaagaaaaaaatgtttatcgaagtggaacgtgaaatggcaaggtatgatatcattgcaggaaagattgcggatgatgcaacaaacgctacccttacagcttatctcgtcggggctttcgggacagcaggcgataaggaggcagacgatttctgcatcagacagttgttgcccaataaactaaaagatcaatattgttttaaaacagaagcagctattgagtgtctgaaatttgtgaaaggtgagaagatatggctgaagtaacaattccaaaggaaaaaatgaattatacaatagaccttcttatcactatggtgacagatgagattgcagaagaaacgggcaaggacagaaaagagatattgacagattttctttgttcaaagacaggaaaagcactgtatgatgagaacacaaagctgtggtgcaatggtccagcatatattgctgaattgtatagggaagagttaaagaaatccggatatcagatttgagatgaatgtatattcggattgtgttgaaaacttccgctattatatcgttgtgacaactaaatatttcaaaagttactgaggtcagcatttcctaattatggaacaatgacctcagtttttttataccaaggaatcggcacttatgaatgacttatttcacagccccttttttcaaacgattaagtaaatacaagtggagcatgaactaagcattattcaaaagaataatcgtatggaatactttctgggaactatcataatacattttgatggttccgttatagttgctgataattcggctgacacttttcaggcctaagccgtggttttgtacatcctctatagtattgtttttttgggtgtgggtagttgataagttaagtgcggatactttattaaatatattagtattctgtgcaatatttagtttagcattatttagccctatagattctgaaagacgtcatttaaatacagatcagaaaaaacagtatagaattataacaatattcataacgataatattttgggtgatatatgaattattgctgtatatggaatttgaggtatatgcagtatgtattgcggaaggaattatgttgactgcaatattacagattccatgtgtagtaaaaaaatatgaaagaaatttaacttgtaaaaataagacgctcaacgaggataaccgttacaagtggaataaagccaccttgacccatatcctcacgcggcaggagtattgcggcgatgtagtcaatttcaagactacaaagcatttccgagataagcgaaaccactatgtagacagaagccagtggcacatcacagaaaatgtgcatgagccgattattgaccgcactgactttgaaaatgtgcagcggattttggaaaacgcacctgtcaaacgccccaacggggacggagaaatccaccctctgtccggcttgcttttctgtaaagactgcggtgcaaaaatgcacattcgcatagattacaggaacggcggcaagcgccatgttgcctattgcagcgagtatcacaagggaaaagacaaaaatcccaagtgcagctctccgcacatcatggacgcggatctgctcatgcagaccgtcgcagatgtgctgaaaaaaatcgcggaatactctatcagcaaccgggcagagtttgaagccttagtgaaaaagagccttgccatgcagcagaccgacaagacaaagaaacagcaaaagcgtatcccgcaaatcacgacgcgccttgaacagattgacaaggtgctgaataaactttatgaggacaacgcgctgggtactatcccacaagaccgctatgagcagatgtcgcagaagtattccgaagaatactactcactgaaagcggagcttgaacagcttagggagcagctatccgcttttgaaaacgcgggaggacgggcgcagaagtttgtaaagctgatagaccgttacgctgactttaccgaccttaccccgactatcctcaacgagtttatcagccggattgaagtgcatgagcgcgacaagaaaagggcgaaacaggctattcagcatatcgggatatactttaaccatatcggcagatttgaaaatgaactgacacagcttgcagagccgacagagcaggaaatccggcaaatgcgggaggaaatcgaagaagcaagaaaggaaaagagccgcgcctaccaccgcaactattcaagagaataccgggcgagaaatcttgaaaagcaacgggagtatgaccgtatcaaagcgcgggaatatcgagcgaagaaaaaggcgcaggctgccgccgcactgtccgcaccataaaacagaatagcaacatcatcgagggattttccgaactacgggaagtcccttttttacgcccggagaaaggagcaacctattgacagaaaagaaaggaacacccaccccgccgaccaagccggacggaattatcacgacacagaggaacgggcagaccattgttgcggagctgtttttcaatcccaacggcacagaaacattctccgacaagctgctgaaaacgatacttgccgacagtctgcgtttttctgcgtctgacggtcaagagctggaaaaaacagaaatcttgcgataacagccgccccgacgatacattccccgcttgggcggtttttatcgtcaaaaacgccgttttccccaagtcaagagctgaggaaaacacccgaaaaatgcccctattgcgtaacagtggcgcagaaaggagcttgcatgagaacagggcttaccaaacaggaaaagaccactgatatatggtttgacgagaaagacccctttatccatatccgcacccacaacaccaacctcaaaaagcggcttgccgcttatgccgagcagtaccccgacgagtgctgcaagaccgacacagaccccgaaacaggctgcatggagtttgatattgcaaaggggcgtttctctttccgtctgaccgccccatacagtgaggaacgccggagagccgccagcgaagcggcgaaagttaacgcaagcaatctcacgcgaagtgtggtataattttttgaaaaagtttgagaattgatgtagtattcgtcgctaaaaccgtagtatatagatgaagccggagaggaggcggtgcaatgatagaggatgaaaaaatcatagaaatgttttttgagcgttcagaacaaggcatacgggagttggatataaaatacggaacagtctgccacaagctttcctatcatatcgtaggaagtaggcagaacgcagaggaatgtgtaaacgacgcttatttaggtgtatggaacactattccccctgcacgacctaacccacttttatcctatgttctgaaaatcgttcggaacatttcaatcaaaatttattggagaaaggaagcagccaaacgaagcagccattacacgattgctttggaggaaattgaaacctatatagcagatactcacacagtagaagcagaaattgaagctaaagaattagcccgtatcattgaaagttttttagatacgctgactactgaaaaccgcgttattttcatgcgccgctattggttttctgacagctacaaagacatagccgaggttgtggggctttcagagaaaaatgtctctgtccggctgacccgtatccgcgaaaagatgaaacaatatttaattgaaagagaggtatttatatgaacgcaaagaagttttccgacgctatgggcgagcttgacaataaatacattgacgaagcccttaactataagaaaaaggtcaagaagcccatttggattaaatggggagctatggtagctagtttacttcttgtctttactatgtctgttccagcattagcggcagcagattttggaccagcttataatctactctacaaggtatcgccagcaattgctcaaaagttaaagcctgttagtatgtcctgcgaggataatgggattaagtttgaggtcatttcggcttatgttgagggtaacgaagcaaagatttttatttccgtacaagatattgacggagatagaattgatgaaacgacagatttgtttgataactttagtatcaatacaccttttgattgtagcagttcgtgtgaaaatataagctatgacactgaaacaaaaaccgccactttcctaatttctatatcacaatggaatgagaaagacattattggtgaaaaaattactttttgtgtccgagaaatgctgagcaataagcaggaatatgacgcgatattgacaaatttggatttgatccaaattagtgctacaccaaaaacaattaccccgactcaaatttttggtggtgggggaacaaactacaatgaaatgaaaaacaattttcaggcattgaaaacaacaggtattctttgttcccctattgctggggtagatattacagctatgggatatgtggatgggaaattgcatatacaagtcaagtacgaggatagtttagaaacggataatcatggctatatctatttcaaaaatgacaagggtgaggaaatccactgtatcgcaaatattgcattttctactgatagtgaacatcaagaacggtatgtagaatatgtttatgatttgtcagatgttgatttgacccaatataaagcatatggatattttgttacgagcgatacacatatcgaaggaaattggagtgttactttcccattagaaagcataagtcaataagttttcgtagtcaccgatataaatacaaagtaaataattcaatgggagcagccttttttacacaaaaacggctgctcttttctatgcctatgagcagaaaggagcgaccagctatgacaaacccgaaagagaaaacccgcgaggagctgcaagccgagattgaggacggaaagaagaaaatccggcagtttgaaaaccgggaaaagatgttgcgtcagaagttatccaaagaagaacgcagaacgcgcagccaccgtcttatcgtccggggtgcagtctttgaaagcattgttccggaagcaaagaacatgaccgacgaggaagccgcccaccataacgccgtattcgtaggacgggacgaggacggagtaccacgctacgcccaccaacgcggcacagccgggaacttccggcttgatgtgaaaggcagcgacaaagcctttaacttctgctatcggggcgagggcgaaagattgtttgtctttgaagcccctattgacctcttatcttttctctgtctgttcaaaaaggactggcaaaagcaaagctatcttgcgctgggtggcgtgggagataaagcccttatgtgctttctctctgaccgcccgaacatcaagaccgtatatctctgccttgacagcgaccaagccggaaacgacgcttgcagccgccttgtggagcttatgccggaggacttgaccgtccaccgccttatccctcttttcaaagactggaacgaggtgcagacgcgccggaatgaaatcacagacggaaaatatctgcgggaagctgtctatggcttgaaagaaccgccgcaggaagaaaccgttgagattatccgcatgagcgaggttgacacacagaccgttgaatggctatggaaaccgtatatcccctttgggaaagtaaccatagtacagggcaaccccggcgagggaaagaccacctttgcgctgcgccttgccgttgcctgtagtactggcgggacgcttccgggcatgaagcccatacagccgtttcaagtgatttatcagaccgccgaggacggtttgggcgataccgtcaagccccgcttgatagaagccgcagcagaccttgaccgggtgcttgtgattgatgaagcaaaacgggagcttaccctgtccgacgagcgcatagagaaagcaatcatacagaacggggcgcgtctgattatccttgaccccatacaggcgtatatgggcgacaaagccgacatgaacaaggcaaacgaggtgcgccccatttttcgccgccttgccgaagttgcggagcgtaccgggtgcgccgttatccttatcggacaccttaacaaagctgccggaggacagagcgcatacaggggcttaggttctatcgactttagagccgcagcaaggagcgtccttttaatcgggcgcgtgaagcgtgagccgaatgtgcgcgttatcattcacgacaaatcttcccttgcgccggagggaaagcccgttgccttttgccttgacccggaaacaggctttgagtggataggcgaatatgatataactgccgacgagctgctgtccggcgcgggcggcaacaacgccaccaaaaccgaacaggctgaaaagctgatacttgacctactggcagacggaaaagaatttgccagcgaggacatagagaaagccgcagccgacgcggggatttctgcccgtactgtccgggcggcaaagaaaaaccttgacgggcgcattacttcaaagcgtatcggcgcagcatggtatcacgccctaaaaaagtgaactggcaaaatccaagtggcaaaacccagataccttgccactttgccacttcgccacttcaaccataatcccacagccccatgtatgaccgcgtggggctttatcgtggaaaaaagagcctatgttgcgtcaataactcaaaaaagcacttgacaaaacgcttcatggcttacatggaatgataaaatggaggttagtattgatgaaacgaaagtaaaagaatggatgaatgaattttgctctacatacgattccattggaaaaatacgttctattacgacaccgacgggaaaaacagcaagtgtttcgggaggaacatatggttggtcagtcgacgagccagaagaaatcaggaaattgattgagaatattaaaagtggtgaaagagtagaaagagaaccggtgtatgaaaaaacggtagcatctcattcgcagcaggattggggagatacatatgttgaggtagatctttcaacgcagcatatgtggtatattgtgaatggttcagtacaattagaaacagatattgttacaggacttgcaagtgatccgaacagagcgactccatcaggggtatattctattcttgaaatgaaaagagataaagtacttactggagaaacaaatccaagcacaggagaacctatttatagaacgaaagtttcttattggatgcgtgttacatggacgggaatcggatttcatgatgcaatctggcagtcggcgtttggtggaaacaggtatcagacttcggcaggctcgcatggttgtattaatatgccgttggatcaggcagcttctttatatgatatgttagagatgggaacaccagtagttatacacgagtgatattgaaatagagatgaaaaaatactggtcgcacgtagtgtgaacggtaacaaaatataaaagttttatcaacttcaggaaacggtattgacataatcaacaaggtgttgtatagcctgatacgaaacaaaattaaataaatgatactttctcttattcagagcagtggagatacaaaggatctaagaagctgcggcaacccctcgtaataggaaggtgccaacctgagcgagttatttcgaacaataagaggattgttaagataaactttgattaccctggaaaagacaaaggagctggttacaattgtatgtactcagctcctttgtgtataataacacaaggaatgattcatcaaccggtatcctaagctaaaacaaggaatgaatccctataggaacatagaatattttgagaaacgaaaagaattcatcaggagaaaaagaaaaatagcaaagaatcgagttgccgctgctaatcctacttatgtataaaaggattagtagtcatcaaggctcgagccgtatacagggaaacttgtaaaaatataatggatggctgcaacttttttcatatgacttttgtatataaggtaaagagatgaaaagaaggtgggaggtggaacgtattgagtaattattatgatgagaatgaactaattagacgaatccaaaaaggagatgaatcagcgttagcaataataatttcggaatatcatgcttatgtcggaaaaattgtatacagtatcttaggcagttactctcataaaattgatcttcagggtgtggttaatcagatcttttttaccttgtggcataaagctaataaaattgatccatcgaaaagcgttacaataaaaggttatttaggcatattggccagaaatacagctataaatgaaaagaaaaaatgcataccagattaccagataaatgatgaggtcatagcagatatttccgatgattttaaccaggttgaattgagattactgctggcaaatgctctgagaaaactgaataaggatgagcagttaatattagttctgttttattttcaaaatgagaaaatagccgatatttcccgcattacaggtattccggcatccacagtaaaaagcaaactcaaacgctgcaaagagaagatgaaaaaatttttggaagaaggaggaaatcagtatgaaaatttcgtataacgatatgtttactaacatttcagatgttgcttatgaaatattagaagaaaatgatatgtttaatgatgaaaccgatgatatgttttcttcagatagaacttgtaaagatgtaacagatatgatccatgatcagaaaatcgtgagaaaaaggcattttgctatcaagagtgttttactggttgcagctcttgctgcaatgtcgtctattcttgctattgctcacaactacggtgcagcattaattgatgacagcaaccggcatttagttggaaaaggacttcatggagaaggacagataataggagctgatgaagagatagaggttccggatgaaccttcagatggaatttgggaaacaacagctcgtattaaatcatacaaaaacgtaagcattagtccaaacagtataacagaatttgctgtatccggtgacgccggacaatatattactccggaaattatatttggcaacaatgatttagtcatttttgagcaggaagacggatcaggctgggaattaaatgagggagaaaccttaatgattcaggcaacggaatatgaagcggaaacaaacggtggaaatggccagggaatcatgtatttttatatctgtgacggtgaaatattagatggaaaatcagagcctcgtaaagaattaaatcaaacctttgaattaactgcagaaaaatccggagaatattatatctgtcttttaggtgtaagctcagatcctatatctttaaaggaaggaaaaatagttattaaatagtaaaaaacggttatgagagagagtgcgattaccaggttaggtgatcgcactctctctcatttttttattataggaaacttcaattttttttaaaattatgcaacttttttaatgttccattgtatatacaggtaacaggaagtgtggaaaataaaggaggtaaatgtttttatgaaaacaattttaaagcgaacgattgttttttttctttctcttgcaatgataatttctgtagcatgttctacggcggtcgcagcagagacactagaagatcaaaatgtgacatcacatagggtaagttatatcatctacaaagaagatggtacagtaaaggaaaccggaacattggcccaaagttccaagtgattgataagaaggatctggaattttataaagaggcagaaaaaacagataagagtatcaaggtctgcgaagtgaatgaggaggacttcttatatcttaattttgatacaaatttttcatgattttcctcctttcttgaggagtttaagatttatagacaactttaaaagaatgcgcatgtttttgtatacacttaatatatatcacgcttaaaaaaataaaagaattgttttgaattattttttatagtattctataatagtggtaatttatataattttaatgtttatttttaagattctctaacaaacttttatactatcctataaaacggtcaattttaaaaatcacgaaattgcaggctttacaacactttgtaacacgatatagacctgtccgataatccctctcatataaaaataatcaatgcttcatttttaacacaggaagataaagacatctccctgtgtttttaaagaaaatcaatgaacaggaaaaacagaagggagctaccaaagaacggctttcggtatggcagaaatactttatcaatggggaataccttcgatctgcagaaatggcagaggaacagaattacaatatgatcgatggaagaatcaacaatctgctaccgaaaaaggagaatccagaagtaccaaagaagaggaaatctgtccttttgcgtttgtataaacaccgctgtgaggttgcaaagaaacagggaaagccaatgccgaggcggtatcaggggatggagatggagcggaatcgtaaataggtaagaaatgacaaagggtgtgggagaaatctcattgccctttttcgaaaaagaattgtgtgatatatataaaataaccaagtgagaattgtaagttttgctaaaaatataaatgaatcgttgaaaatattgtgcataaaatggaaaaatgataaaatcaaaaatgtggtgaatataagacatattatttttgaggaacagagtgctttagggaatagtgtgtctttttagcatgttcaattagtagatccgatttcgtaagtttaagatcaagatataaatattgaaggagcaatatgaaaatacaaaaatatgtgaaaaaagatattataaaagtaacctcaattttaattttactactaggattattgactattttatatttgtcagaaatacaaagtatatcaggatatgttgtacaaattaattatcccaataatattgctataaaagacgaatttgagaatgtatattggataaagccatttggagattttgagaataaatatgagataggggaggaggtaaaagtatattattatccgaattcagaagatggctccaatgaaaatacattatcccattctattgtattcagtagataatgttgttatttatgaaggaggcaactaaatcagagctaaacaaaaatttaaattgagtgctactattataggaatatgctttttgttacatggaatacctgtatttgcagccgaatcaagtgaaatgatagagtttgatttaaagactaatgagatgaagacagtagaaattgaggaacaaaatagtgattcagttgactcatacattccagagggaatcagtactggaattcaaacatatggagcgattattgatggtgatgataggtatagaattcctgctagtttatcaagtacaactttcccatattgctcttatggtgttgtgagttgtactaggcccgatggaacaagttcatttggaacaggatggctttttggtccgaacgatgtggcaacagctgcgcatgttgtatatagtcaagagaatggtggatatccttcttctattattttttatcccggggttaataacagtggatcaatagtaggggcatcttataaggcaacaattgcggtgctaccggcaacgtatcaaagcgaacgtgatgagacgaaagattatgcttttttatctttaaattataattatctgttgaagtatcaaatataaagagtgaaaggtcgagtaagccaacttcatgggaagatgtttctattgacaaaaaatatgatacaaaagatatatacatatcatcaatggggcatctgccagagttcattccattttaaaaataaacgtgtggtgaaacgtaatgaagaaaaaaataatatatgtcttatgcattttgggtgtgcttttggcgttattaggactaaaaaaaagaaatgacacaatgtattcttcgggggtataccatcttaacagaagcgggatagtagaatctatagataagaatattatagttgttcgtttggataaattgaatgaacaagatgaggattttaaaaatgtcaatacattgcaattagattgtagaaattgtagttatgaattagaaaatttaaaggaaggtacaaaaattatattttactatttcccatataatgcggacgttcgaccacttaaagtcgaaaatatctatgtgataaatgaaaaagaatctaatattgatttgacggagaaagccggacaattatttaattcctatcgagataaaacagatgagtctatttatgcaagaggtaaatctggtggcgttattactacaaaggatattgaacaagctactgaattctacattttagcagggtatgaacagtcagacgctgaagataaggcagtagaatatatgttacgacgcgatgcgacttatcaaagagctattgcagcgggatattctgtgtctgatgatgaaatcaatgattatttagatgatttaaaagttacaataaatgattcgattaatagtgaggaggctcaggctcttataagtcaatttggttcggaagaaggatattggcagcatgaatttgaagtttataagataaatttaccaattgaaaaatatttagaatcattaaaacaagaatatttgaagaatagtatttctacacaatcaaataatcaagaggcagaagaaacaatagaaaattataatcgttatattgaagaagttcaatcagagttagttaaacaagagcaatatgaaatatttgaatgatcaatatcatgtcaacatgaaagactttcacgtacggttccgtgagaagtttgaggtgaaaattttcttacctacttgattgagaggttggctaatcaactaatgcttagcctcctactcgattgccatgaactgccagagaggatacgaaaggggcatgataccccattcccagtcagaagagtggaaattccaaaaccagacggagaaatgcgaaagttaggaattcctaccgtcatagattgcatcatccaataggcaatattacaacagtcgatgccgatttatgagctgaagttcacgaatggaagttttgaataccgtcctggacggagtccaaaagacgcggttcagaagataaaagaatacgcagaacaggaatatacaaatacaaaaacggaagaagagcagaataaagaaaaaagagaggaggttataaaggagtgatatgaataataataagattcaaaaaattttccactatataatagttcttttgctcgtgattctttggtctattatgatgttctttcctgagcacatagatactatgaattttaaaatatttttttctatttcacttgcttgtaccatgatttactctttctgtagaaagaaatacttttctatgcaaacatactgtaaaacagaaaaatttgtttttacttttttaataatactgctttttttaaggtttatgttttggaaaaattaagttatagaaatagttctgtctatagttgaagcggctattgaactgctccccgtcaagtagacaattgaaaaaatataaatttttcctaccagcagaaatttatctgctggcagtttttatgcagcttgcaagtaaatttcatgtttttccattggtgttaaaattccaagattcctttgcaaacgtttgttgttgtagtaatctatataatcttcgatcatttttacgagagtacttctatcagtgaatcgttttccatagtatcgctctctcttcagaattccccaaaacccttccattggtccattgtcgatacatttagcaactcgcgacatgctttgtattattccagcatttacaagttttgtatgaaatgtcctgttcgtatattggaaccccctgtcactgtgaaacagtggctgcgcaccaggatttctaagtaaagcattgtctatcgtatcaaacaccaaagcattgttgttcttatcacgaataacatacgaaacaatccgtctatcatatagatccagtattgcacttagataaactttatgcttttccaatccaatataataatggaattctgtcacatcagtgagccatttttcatttggtgctttggcagtgaactcccgattaagtatgttttccgctatatactgagggtttgcagcctgtcttgtgcctccgttgttagaatacttgacagttgattttatattaagtttacggcaaatgcgtagtacacgtttatcgtttacatcaataccatgatatcgttccaaatcatctctgattcttcgatagcctttatccggtgagtctgtatgaatcttttctatctcgtcagcaataagcctattcttttgctcacttttaggaatttctctgtgtagccatttataataagctgctctagaaacattaccaagtttacaaagtgcagcaactgaataattatgatcttcatgttcttctttgattgcctgatatatatgttcatgacggaccaggcttagccccgcctcctctctatttcttcgagtttttttaaaaaagatgcctccatttcagcacgttctttctctgcttttaaaattttaacttcagcacgcagcttttctaattcactcatttcatcgggacgttttcgtttgccacggttatctcttaaagcttccactccaccagcttcatatttgactatataattgcgagcctgttgataggacacctggtattgttctgctgtttgggcataattacgatcatgtgcgatacaatactgtactatttcaacccgttcttcaaaagtggtttttcttcctttggtcatgacaatgcttcctcctgttccagaagattttaattctacatgaccattatacttctttatccaagtttgtaacttaccttttgaacggatcccgcattttttgcaaatatcattttgagaaccatggcctgctaaataatctaagactgcttgttgtttcaattctttggaatattttttatttcctttcaatgtgaatgcatttactcccatagattcatagtttcgaatccattgttggacagatgcaagacttacatcaaacatatcggcaattcgccgttggctttcttttccatccagatatagatttacagcatatgtcttatcctcaacagatacttttcttttagacataaaatatgcagaatcgaaaggattctttgattttaaagcagaaagggaattatattccattgttaaagcatggtgagagtgttcaagtcaacgaagagagaggatattgttgcccgagaactgcaaaaacaggaaatctatacagaaaaaagaaccgacaattgttttgaataacaattctgggttctttttttagaaagcgatttagtttcacattattatttgatatttttttctatattcagacggggaaagcccgctttgtttcttgaaaatacggctaaaatatagtgggttttcatatccgatcgctcgagaaatttccgatatattaaaagaagtatttcgtggcttttcactggaaagccggtgcgtcagaattaagagttccattaaataataaacacaaagttcttcgtactcacttttgcaaaaacgtaattcatttataatagatgtaaaaattcgtttatattcaagagaagtaccggtataaattatatgcatatcatcagaaataccatgctgtctcaaaatattcgttatattattcccagtaaaatgaacccagtaaacttcagtttggtctacaccataatagtagtagcgttgctcttctttggggcggtagatcaccatatttccggcatttacaatttctttcttaccatgaaaataaaattctccttttcctgaggcaatataaataagttggaaatctaatcttccccgaggacggtgtgttggtaacttttcgacggttttcagacgatatgtgccgcaaaatctgttagcagaaaaatccgtgcagttaaagaaagaaaatgaccacttagagggtacaatctgtattgatttagaaactgttagactgtgggataatcatgatccttatttatatcatgcgtatgtagaacttaaagcagaagatggaagtttagtagaagtaattccttacgatattggtttcggaagaattgagattattgataagattatttatttaaatggaaaacgcctggttattacaggagtaaaccgtcatgagtggaatccaaaaacaggaagatgcattggattagaagatatgcgagcagatatcgcatgtatgctcagaaataatattaattcggtacgcacctgtcactatccggatcagataccgtggtattatatgtgcgacaatgcaggaattcagaccgggaatttgctttttcatgccttccttatacagcatctgaaattgaaaatgctttgcatcatgaggaattaccaccagcaagaagaacagttttatgcgtatacggagcagtcagaggagtcggaggtatcgacagctgggggagtatttggaagatagttggtgatgtttgatgactagattggcaataattctatgtaggtcaatgaagataggggaactgttacctgagaaaagtcaacaaatttgtaacccgctacaccatccattgcctttgtcacataagcatgttaaaatacaataaaatactacaatattatttgtagggtgcgtggggacacactttacaagaatttaccatcacgaagaacgaactgttttaagtgaggtggtatttatgaaaaacttgaaggaattaataattcttcattcaaacgacatgcacggagattttctggcagaacagattgatgaaaagctggtaggtggtgtatctcttctctcaggatatgtgaacatggtgcgtaatcaggaaaagaatgtgctttatgctattgccggtgatatgttccgtggttctgttatcgattccgagtacaagggcgtatcaaccatcggtattatgaatctacttgggcctgatgtggcaacgattggtaaccacgaggttgattatggtctggcgcatttgctgtttctggagaaatgtgcaaacttcccgattatcaatgccaacttccatatccgctctaatcataagcgactgtttcagcctcactatattgctgaaatagatggcatgaagatactttttattggaataataacagaggatgtacttgcacagacaaaagcagaagaactgattggttcctttgtggatatcagcgaagcagcacaggaagtaggcaatatatgcaatgcttacaatgccattgatattgatttcacagtacttctgacacacatcggattcgaggaagataaaaagcttgcagctttactggatccagcctggggtgtggatgtaatcatcggtgggcattcacacacgtttctggaagaacctgcacttgttaataatatctatatcgtgcaagccggtacaggcacagatcagatcggacgctttgatattatggtagatactgatcttaatgcaatcgatacatttacctggcagttgattccgatcaacaacgatactgcgctaaaagacgaagctatggaacaatttataacacagtataagcgggaaactgacaagaagtatgatcgtattgtaacaagattcaccaaatgtctgacgcatccactccgcaatcaggaaacagctcttggtaacctgatcgcagatattctgaaagacagccttggaattgatctgatgcttctcggttccggtgaagtcagaagttatgaattgggacctgtcgtacattatcacagcctggtagaatgcctgccatatgatgaagctgtctatatgctgaaagtaaccggagcacagttagaacatatgctacgttttatcctgcgcgaagaagcctttcttggagaacatacggagttctatcagttctcccacggtatgcagattatatggtcgcgtaaagaacaggttttccggaaacttagtctcaatgaccagcctattgaagagcatcagttatattctattgctctttcaaaatatcactttatgaatatctctgattttatggatatttcactggaagaaacgaaaaaaaatgcacttcctcgtgtactggccacatcaagtcgagatattgtagaagaatatatgatggttacaccgcatctttgccgtgaagttgaaggacgcctgattgttgtagattgatccattatttgaattaagtttttcgcatgaatcaagaattgccaatttgtaacaataaaacccaaaacattggcacttgattaaaaaatagaatctcccctcatacctaatggaatctaattggttccggcagatatgaggggagattctatttttatgattttgcaattccaagagaactgttttggttgcatttgttgacttgctttttgtttttacagttagttcctagcgtatcgttacccgagaagcgcaaaactgcaaagcaagtcaaagaagagaggcataccgttacccaagaattgaaaaattgagaagcaaagtcaacgaatggatcattgcctgttagaaccggagcaaatggaatcgggaatccgcctgggagtcactagtgcattttatgaatcatcatatgttatcgcaagagcctatcaaaacggggttttttatctgcggattaatccgtaaaatcaatattccttgacattttaataaaatagtttatacttaaaatagtttgaaattcaaaataaaatacaggagaattgaaaatgagtataaacaaacaattaaaaataggtgatctgactgcgaagctcccgattatccagggcggcatgggagtaggtgtcagcagaagttcccttgcaggtgcagtggcgaaagaaggcggagttggaattatttcgacagcgcagattggttatgatgaagaagggtttgagaaggatcaggctgcatgtaacaacagagcaatccacaagcacatcaagcgagcaaaggaactcgcgcagggaaatggtcttgtcggtgtaaatattatggttgcactgaagcattatgcggagcatgtgaaagaggccgtggcagcaggtgcagatgtgatcatcagtggcgcagggcttccgatgaacctgccggagctggtcagtgagacttgcagaacgaagatcgcgccaatcgtttcttctaaaagagctgcgcagctgatcttgaaaatgtgggcgcataagtatgacagaacagcagattttcttgttgtagaaggtccgaaagccggaggacatcttggtttttcaagagagcagttagatgagattgatacgatggattatgatgaggagatccgtcagatcattgcctgtaaggaagagtatgaaaagcgatacgagaagaagattcctgtgatcgttgctgggggaatcttcgacagagcagatattgatcacgcattggaacttggagcagacggagtccagattgcgagcaggttcgtggcaacagaagaatgtgatgcgtcagaggcgtataagcaggcctatatcaatgcaaaagaagaggatgtccagattatccaaagtccggttggaatgccggggcgtgctcttcgcaatgcattgatcgagcgtgtcgagaaagaaaaagagcctattaagaaatgttataattgcttagcaaaatgtaatccgggaaaagttccgtactgtatcacgaaggcgttgattgatgcggtcaaaggtgacgtggaaaatggacttgtgttctgcggaagtaatgtcggacggatcaatcagatgatgagtgtacatgagctgatgcaggaacttgtgtcttagataaatgggaagaatccaaagtcatattgaggaaaattaaaaaaagagagaatagtgtgaaacaaatttaaaatatcacattattctctctttttatgatatacttagatgatatcagatatgaaataatgagatgatttattaaaaatagaagtaacttacaaggagtagcaaggatgaagatgcagaataacgatacaaaagatgaaggactgaaaggaaacgagaagattgaggaagcaatttttgcactccagcaggaaccatctcaggaacttttagcacatgcgttgacaatgatccgtagacgaatgaaagaagaaggacaattgattcttgcggtagagccttctgttgcagaacaactgaagatacaggcagtgaagacagctgatggaaagaagtggtggagtgcatttacaagttttgaggaagaattaaaaggttctaatagtgtgatgtctacatttttgacagcaatcgaaccattattccagtctgctgtacaggagaatgagattgaaggtatcattctgaatccatggaaccggacaatcatgcttgacaagacactgcttcgactgattcttggagaaagtggaaagtgagaacaaagcgaaaaatgacagtaactataatatgtattttatttgcagtgttatttgcctggtatggattctggatgagcggaaatggatctgggacgggattcttcctgatctggtttgtattggctgcattgcttggaggatgcgcagcaattacatttctggatggatgggcaagacttccgatgtggatgatgtggatattaaggggaatactgcttgtatttgtagtttcctttgtgattatcgaaggatgcattatcagtcagatgcatgcgaaggcagatgaaaatctggactacatcatagtgcttggtgcacaggtgagagcagatggaccgagcaaagtgctgaagcatcgtttgaacacagcaatcgattatctggagaaaaatccggagacaatctgtattgtgtcaggtggacaggggtataacgagccatgtacggaagcgcaggcgatggctgattatgtggaagcggccggaattgagaaagaccgtttgattctggaagacaaatcgaagacaacagagcagaatataaaatatagtaaaaaatatatgaaaaacggagcaagtgtgggaattatcacaaatgatttccatatgtttcgggcaatgcagattacaaaaggtgagggattaaagtcagcgaaagcaattgctgcaggctcgaatccattgtatctgccaaacaatatgcttagagaatatctggcagaatggaagtatctgatcaggtcaatcttataaaaagcaagaaaagagagatgaaagaaacaaatgggtagacgagaattagaagaacgaatcgagaaaagaagagaggactttgtaagaaacagtcttctttcagatgaatttattgactttgtacaggagaatttaaagccggtcaatacgatgatggcttattatcagtgtgcgatcatggaagttgagacgaaatttaaggtgctgagcgaacagtattcgctggagtatgaccgcaacccgattgagagtattaagacgcgtgtaaaatctatggagagtctgctgaagaagattcgtcgtaaaaatattccattgacgattgatgcaatcgaagaaaatattcaggatattgccggtgtgcgtgtgatctgcgcttttcaggatgacatttataaacttgcgaaatgcttccttgatcaggacgatgtaattttaattcaaaaaaaagactacattgcaaatccaaagccaagtggttacagaagtcttcatctgatcgtgaagactccgattttcttaaaagaaggaaaaaagatgatcacagttgaagtgcagcttcgtacgatcgcgatggatttctgggcgagcctggagcataagcttcgctataaaaagagtattccggaagatcagagtaagtatctggcagaagagatgatggactgtgcacagatcagctcagctcttgatgagagaatgcagaaggtgcgtgatgtgatcatgcaggcggaggaaaaagaggaagaaaaaagtagcggcgtggaaccgttaatgcttcgaggattgacagagcggataagacagaagaatctctgatgtagacaggcggaagatgtttgagacgaacagaaagctgtcgagatatgcagagatttgtagggataaacagagagccggagggaaaagattatgatcaatcgagaagatatgctggcgctgaccagacgaatgacagtgaaacggacatcgatcactcggatcgccgggggatatatggatatagacggatttatagatggaacatttaacaccagtttcctgaaattaagcccggcagaacaggagaagaatctggcacttgcgaagaaagtgccgtttgcaaaaacaaataaaaatctgaaggaatataagttttctgatgatcaaagaaatccggacagtatgtggaagcttctgatggggatgcgtgcctgtggcttgaaaaatgatgctctgatggagacattttatgagattatcggggaacattaccaggcagatgaagattatgcaatctatgtttttcatgacagatatgacattccggcgaaggggctggatcatatacgtcagggagaatcagaacgaatgtatgaatacattttatgcgtgatctgtccattaagcggagaatatgaaccgggcgaaccggaatgcggtttcctgtttcctgcattcgtagatggaggcgctgcaatgaattacgtggatatttaccaggaagacgaagaatacccgcatgaagaactgcttgaactgcttggagtggaaaggaaaaagttatggcagaaacatacaagtcaggagaaaaagtaaaataccggttggcagaggcaatgaaagaatgcatgaaaaaagctccggtcgaaaagatcactgtgaaagagatcacagaagaatgcggagtgacacgtcagaccttttaccggaattttcaggataaatacgatttgatcaactggtattttgacaagatactgattgaatcctttgaacatatgggagagggacaaacagtctatgaaagtcttgtaaataaatttcaatacattcagaaagaaacacttttctttcgtgcggcatttaaaaatgacgaccagaactgtttgcgtgatcacgactttgaactgatcacacaattttataccgatcgtatcgaaggaaacaccgggaaaaagatgtccgacaagattcgctttcagttagaaatgtactgccaaggctccatttacatgacggtccaatgggttctcggcaatcacaaagccacccccgaaaccctggctagattcctctccgaatccatgcccgcagaactaagagacgtctttaaagaacgtggattgttgtagatagatttatttctacacacaaaaaaatgtgcgaatcatttcaccccttcgtatattccgtaaatctatttctatacacagaaaattcggaaatgtgggataaagtgaatctccgaagaaggatgacgcatcgaagatggtgaatgtggagtgtgcttgataatacttgaaaaacttaaggttacgttaaagaaaggtttggaaactgtctgagcggcagtgagttttccaaacctttctttgtatttagtaatcttaagtttttcctagaattatcagtacacgtaaccctgagccagattcgatgcgtcatcctttgaaggaatcacagcttatcacatttcagaattttcgtccgtgtatcagaaatcaatttacataagctttctaaagagctctttcagatcctctacacttgcatctttcggattacccggtgcacaagcatcagcgtgagcagactcagcgaggaactgcaggtcttcttctttcagagcttccagttttgtcgggattccaacgtcaacagaaagtttctgaacagcatcaacagcagcttttctgtattcttcaacagacatgtcgtcaacacctttaacgcccagtgctcttgcgatttcacggtatttctcacctgtacaatctgcattgtattccataacgattggaagcatcatagcacatgcaacaccgtgtggagtatcgtatacagcaccaagtgtatgagccatagaatgagcgattccaagacctacattagagaatcccattcctgcgatatactgtccaagagccattccttcacggccttctttttcatttgcaacagcgcttcttaaagattttccaatgatctcaattgctttgatatggaacatatctgtcatttcccaagcagcttttgttgtatatccttcaattgcatgtgtcagggcatccatacctgtggaagctgtaagtccctttggcatagaggacatcatatccgggtcaacaactgcgataaccggcatgtcatgtgggtcaacacaaacgaattttctctttctttcaacatctgtgataacgtagttgattgtaacctcagcagctgttccggctgttgttggaactgcgatgatcggaacacaaggttttgttgtcggtgcaacaccttcaaggcttcttacatcttcaaattccgggtttgcgatgatgataccgattgctttggaagtatccatagaagaaccaccaccgattgcaacgatgtaatctgcatcagctttcttgaatgcttctactccgtgctgtacattttcgattgttgggtttgctttgatatcagaataaatttcgtaagcaagtccattttcatcaagaatatctgttactttctttgtaactccgaatttgatcagatcagggtcagaacatacaaaagctttcttaaatgctcttgcttttgcttctgtagcgatctctttgattgcgcctgctccatgataagatgtttcatttaacataattctgtttgccatgattttcgatctccttttttaaaaacagattttcgggaagctttagagatattcccgatgtactatgtctttattttaacaagcgtaaataaaaaagaaaagttacaaaaggttgaaaatgtaacattttaagcttttttttgtggaaaagttttgaaaattataaagggtttattaaattattgtgaaacaagcacagaaaataaaatcgaatactagacgagatgaagagaaagttgtaaaatctaattatagttttgaatctggaaacagatcatttacggaaggagacaggcattatggaaaaattaacagacaacttaaagaaggtaatactggctggaatcggagcggttgctacaactgcagagaagtcaaaggacgttcttgatgatatggtaaaaaaaggcgagcttacagtggagcagggcaaggttctgaatgaggaactcaagcataatctgaagcagacagtaaagaacaatgtgaatgtgaaagtcaaagtcactacaccggaagagttgagcgaacttctcgacaagatgacaccggagcagttagaagcactgaaggctcagatcaaggcgaaagagtcaaccgtagattcggaagcagaagaggtagatgcagaagatacagcggaagatgttgaaaatgtagatgatgcagaagttgttgaggaagagacaaaagaagagtaaaaatattagagaagctgccgaaaagcggcttctctgctttctcaagaaagaaaaaagtgactattacttttgaactatcagcaagggatactgaagaaaagaggaactcgtcaccgagacagcaggagaatacagatatgagtgagaaagaaaagggaacaaataattcaagatttagagagattatttctgtacttcgaaaacataatattacacgtggacttagtccgaagaaacttcgtttgatcatggaggatcttggtccgacttttgtgaagatcggacagatcatggcactccattctgacattcttccaaaggcctattgtgatgaattgatggaattatgtacggatgcaagaccgatgctcttcgaggaggcagtgtctgtaatcgacgagtcttacggacgctcctggaagaaagttttttcatcaatcgaagagacgccaatcggttctgcatcaattgcgcaggtacatagagcagtcttaaagtcaggagaagaggttgtcgttaagattcagagaaaaggcatttatgagatgatggcgcgggacattgagtttatccgtaaagcaatcaagctgatgccgccgatcagtctgaaaggaatggctgattttgatcttgtgcttgacgaactctggtcagtgacaagagatgagatgaatttcctgaccgaagcatcgaatatcgaagaatttgccagaagaaataaagatgtcaattttgttcagacaccggttctgtatcagcagtatacgaccgttcatgtgctggtgatggaatatattgatggttgcggtattgatgagaaggataagctgctcgaagatggctatgacctgaaagaaattggaagcaaacttgtagataactatattaagcaagtaatggatgatgggttcttccacgctgatccgcattccggaaatgttaagatccgtgatggaaagattgtctggattgatatgggtatgatgggacgactgacagagcatgaccgtgagatgatcacgcttgcgatcgaaggcgttgcactgaatgatgttggtctgatcctaaaggcggttcttggactgggtgaattcaaagaacgaccggagcagagaaaactttatgaagacattgaaggattgcttttgaaatacggaagtaccgatatgggcaagattaatgtggcagaggtcatgacggatctgatggaagtcatgaaagaaaataagatcatgatgccacatggactgacgatgcttgccagaggacttacgcatatggaaggtgtactttccaatatcgcaccggatatcaatatggtggagattgccagagcaagacttgctgcggattttcttcacaattttaactttaagaaggaattgaagaacacaggaagaagccttttgaaatctgtgcggaagatgattgaccttccatccatgacaacggacttaatggatgaattcatgaaaggtcagtcaaaagtaaacctggatctgcgtgtgtcaaaggatctggcatttcttttaagacgacttgtaaggaatattgttatgggtctgtgggtcatggcacttctgatcagttcaagtattatctgtacaacggatatgacaccgaagtttatgggaatcccggcacttggtgcgttcggatatctgatggcagtggtgattatgatctatgtatttgtgaaacatattttctcgaggaagtaaaaaaagaatagaaagcaaaggaaaagagagatgaaattttcgtctctcttttttatatattaggaaagtcctttcctaatatataaaaaacgctccgctcaggatgcgcactgcggcgtacaaggtaggtgtcgcaagcggtctacgtttccacttcggtccttgctaaacaagcgccactggcgcttagcaacgccgcaggcgcaagaatgtgccgaggcacattctttgttcatgagaaaaatatataagtttaaaacagataaatgagaaaagttctcaaataataaaaatccaattgactgtataatagacatcctgtatacttacggagttagttagactaacatgagttagaaaagtataaccaggagcgattacatgaaattaaaaaatataaaatgtttacttgcagtctgtctttgtgcatcggccctgttggtcggatgcggacagaagacagcagataaatccgaaacatcgtcagaaagtgcacagaatcagtcgaaggatattcaagaagcatccagagatgtttttgcaatggatacctatatgacagtgactgcgtatggagaaaatgcagaggtagctgttgatgcggcacaggcagagattgagcgtctggacgcacttttatcgacaggagatgcagacagcgagatcgcaaaactgaacgcagatggaagtgcagagctttccgaagatgcaggttatctgacggaacgcgcattggaactttatcagaagacagatggggcgtttgatattgcgatttatccggtgatggaagcatggggattcccaacacagaactttcaggttccgtcacagaacacattggatcagcttcttccactcactgatgcgggaaatatttcttatgacaaagaaacgaaaaagatatctttcggtgtagaaggaatgaaaatcgatctcggaggaattgcaaaaggatatacctcatccagaattatggacatttacaaagacaatggaatcacaagtggattagtgaatcttggcggaaatgtgcaggcactcggaacaaagacggatggaacgaaatggaagattgcagtgcagagtcccgatgacacagaagattatctgggaattctgagtgttcaggataaggctgttatcacttcagggggatacgaacggtattttgaacaggatggtgtgacgtatcatcacatcattgacccaaagaccggatacccggcagaaagtggacttgtctctgtaacaattgtaagtgaggatggaacactggcagatggactgtctacttcactttttattatgggaaaagagaaagcggcagatttctggagagaacataaggatgattttgatgcaatccttatgagtgatgatgggacgctatatgtaacagaagggctggaaaatgatttttcaacggagagaacagttgagatcattcgatagaaaagtgtaagacagagtagattttggaggaaaaatggatttaaaagaaacaggaaagaagctgaaaccatttgcaccggtactttcggtagcagttgtggcatcctgtgtagcaggcactctgagtggatatcagccaccggtttatgcagcgcaggagcaaacgaattctgtaaaagaagagactacaaagtcagaagagcaggagcaggcggtaaaaggttcttttgatctgacggatggtgtttataagggaactggaacaggttatgtaggagagatcacggttgcggttcaaatcaaagacaaacagatcgttgcaatcgatattctgagttcttcggatgatgcggcattttttaaacgcgcacaggcggtgatcgataagatcatcgaaggacagacattggaagttgatactgtttcaggggcaacctatagttcccggggaatcatcagtgcggtgaagaatgcactgacaggagaaaaagacagcggaacaacaggacagtcacagtctggtggcggagcggcagcaggaagttctacttctgtcgcaacagtggaagacccggcagcatataaggacggaacttattacggaacagggactggatttggcggaacactgaaagtaaaggttgagatcagtggcggaaagatcatagacatccagattatggagaatcaagatggaagcgaatacatttccaaagcctctgcactgatcaatgcgatcatcagtagtcagagcaccaatgtagataccgtgtctggagcaacgtacagttcggttggaatcatccaggcagtaagagatgcattaagtcaggcggcagtgagtggaaatggagcagcttcggattcttcagagacgaatggctcgaacagttcttacagtcaggatcagagtacatccacaaccggaacagttccatacaaagaaggaatctattatggaacagcggaaggatacagtggagatgtatcggtagctgtggtgatccaggagcatacgatcaaagcgattttagtcacagagacatcagatgatgaagcatttttcaaccgcgcaatggatgtagtgaaaaatgtgcttaaaaatcagaatacagatgtagatactgtatctggtgcaacttacagttctaagggacttatcggagcaatcaagaatgctttgaaacaggcggagaaagtaacgaatggagaatccattgaagagaaagcagatacaacggaactggaaaatgcagtcaagtcagcagaagcacttgtgatggaggagtatacgcagagtagctgggcggttctgagtctccgactgaatgatgcaaaagagctgttggaaacagctgcgaatgaaacagtggaacagcaggctgttgacaaagcggtggagaatctgaaccttgcagttgcacagcttgagaaaaagaagtcagatcaagaggaagaagtgaagacaaaatacatcgatggaacttatgaggtgagtataccgtgtaaaccggatgaggatgaagattttacagagtatcagctttctatgaaggtgacaatacgaaatgacaaaattgtatccattactgacgtgtcaggagatggggatgcagcaaatgacagctatatcaagaaggcggcaaatggaacttcaagcaaaaaaggtgtcgtttcccagattattaccaaaggaatgccggaagaaattgatacggtatccagagcaacctgttcttcgaatgcgattattgacggatgcaaaaaggcactggaaatggctttaagaccagaagagacggaggcgcagtaggatgaaagagtttatcgtaagactgtttagtctgctggcaatcgtcggtgtccttttcggatataacgaagtgttggatgtccgtgcaaaggatgaggaaatcgcaaaactgaatgcacagttggaggtacagtcatctggtgccagcagtgattctgagtcagggagtgattcaggagatggagcaggatacaaggatggaacctataccggagaagcggatggatttggcggaacggttgcggtagaagttactgtaaaagatggaaagatcgaagcggtagaagtgacttccgccgagaaggaagacagtgcatatcttgcaatggcggaagatatcattccaaagatcatagaggcgcagagtgcagaagttgatacgatcagcggcgcaacgttcagttcgacaggaattaaaaatgcagcagaacaggcattagaacaggcggtaaagtagtttgaagaagttgaatatacataatttgaaagcaaaagaaattaaaaaattgcatacttggcttcgtgccttgattcagatcctttattttctgtttctgccatctgtgtatacagcggcatttgccggcgtgaaatacatttttacacagataggagcaggcgaggtaatcgggctgacctcttttgtaacggtgcttatagttctctgcgcgtatacgattcttttcggaagattcttctgtggattcgcatgtgcattcggaagtcttggagatggaattcatgcattttatatctggtgttttaagaagaaaaagaaaaagccggtgctgctttcagaaaagatcacagagaagttaagctatttgaaatatctggtgttgaccgtaatcgcagtactttgttttgcaggaatatatggaaaggcaaaagggacaagcccgtgggatgttttttctatgctgcatgcaggaaatttccatttgcagggatatttgccgggagtgatattactacttcttattattgtggggatgtgtctggaagaaagatttttctgtcggaatctgtgtccgatgggagcagtattctcattgcttccggtgcttccgttctttgcattgcaccgcgacagagaaaattgcatcaaaggctgcagcggatgcacgaagaaatgtccatccgggatcggactcccggaagacggatcactcaaagtcgagggagattgtttccaatgccagaaatgtattgatacctgtccaaagaagcatatccatacaggaatcaaaggtctgaagggaaatgaattctggtttacgattcttcgggcaattctgttacttgtaattatgatctgggcaggagtgtaatagatgaagaaaaaagatctgtttttaggaggcggaatcctctttgcggcatgtgtactgtttcttgtgatgaatctgatgcagtatgtacaggcaaaggaaaacggacaaaaagaaaatcaggaaaaacaggttgtgatcaaggtggacggagaagtttacggaagatatgctttggatgaagaccaggtgatcgaagtgcaggaaggagatttttacaaccgtatccggattgaggatggaaaagcttacatggaagaggctgactgtccggatggatattgcgaagagcaggggaagatcaataaccggacacagaccattgtctgcctgcctcataagctggttgtagaaatagaagaagttgagaattctgatgattctcaaaatgaaaaggaacatttaccggatacaatttctaaataaatcaattgttcgactgtaaaggagaatgtatgaatagaaataaaaaacttgcgaatatggcaatgcttgttgcgctggcaatgatttttagttatgtggaaagcctgatcccaattaattttggagtgccggggatgaagcttggagtggctaatctggtcactgttacaggtctttattttctggaaattccggaggtactggcggtatcggtactgcgtgtacttctgacaggatttctttttggaaatggaatgtcgatcatttacagtctggcaggggcggttgtcagccttcttgccatggtacttgtaaagaagatggatggaatttccattgtaggagtcagtatcactggcggcgtctttcataacataggacagattcttgttgcgatggcagtggtggagaatctgaaactgatttattatctgccagttcttcttgtggcaggaacagtgacagggttcgtgattggaattgtcgcaggaaagattttaccggttgtgaagaaagaagctgtaaggacagtatagatatatactttttgattacaggttagcaaaagctaacttgataatatatccatgcggaagcaggaaagcagaactgcggcaggctggatctgtatgtaactattttaattaaaaaggaggttcttatgaaaaacaaagaaatgaaagtaaaggcaatgtccatggcagtggcaatgtctatggtagtaggactttgcccgtcaaccatctttgcggcaacaggaagtcagactgcgaaggatggaacttatacaaagacggctcatgtaaccagaacagaagatgacagtgacgatgagtgggaagaatatgatgtagaagtaagcttgaaagtagaggatggaaaattctctgagattacagtcaaaccaaaagaaggatatgacgaaggaaatgcatcctactttaataaagcatattccaaaacaaaaggatttaaaacaaagcttgaaggccaggctgctacagaagatacaattaacaactgggatacagtatccggtgcaacacgtacttctgatgcgattaaaaaagctgcacttgaagcaatccagtcagctccggtagcaggggagacagttaccattgacacagcaaagcttgagtcagcaatcgcagcggctgagaaactgacagaatctgattatacagcagacagctggagtgcaatgcagacaaaattaactgtagcgaaagcggctctgaaagcaaaggaatcccagagtgcagtggacacagcggcagatgagttgaatgcagcagtgaaggcattgaaaaaggcagaagttgcgaaagaaacgtatgtgttgatgaatattccgtattctgaattttatgcagctgatcaggtagcaggagcagacagtgtatcctccgctacaaaagcgaaaacaagatcaacacttgtagctggatcttatcatgtaaacagtgatggaacagatattgcaggtattacatatccggttaagattagtgatgcatctgtactgaaaaactatacacagatcacagatgacagcaagctttctattacagtgaatatgaaaggaaaagagacaacaacagaatataatggaaaagatgcgttattcgagagcgcaagctattcttactatattttaagtgagactccttcctattataaggaagcaacagtaaatgtagatggttcactcagctttagtgaagtgaaaggtgcaactgcacagaagttgagtgatgcatcaattgatttcacaacagacacaaagtatggagattatgaattagatgtaaatggactcccaaaaacagttaatacagtatatggagttgtgatcagcacaaaagaaggagacaactacggacttcgtcatcttgaaaatatctggaaaaagacagaactggcatggagtaccggatttgtgacaacatctcatggaaacacactggactcaaaagattatgaaaagatgatgggtcagacaatcaataaaatcacatattacacagataatggaatctatgagattgacgcagatcagtatgtgccggttaaattcaatggaactatcgcagcagagaatgcagatgttgaaagtggaaaagtaaatgtaactgtagaaggccttcctgacgattatcaggcagaatatacagttgaaggtcttgaggatgttcaggtaaaagacggagtacttacttataagacaaaaggcgctgagataggcaaatatactctgaaagtatctgataaatccggaaaatatgcagatcttacgacagattttgaattgacaacagaagctgtaccggttgtatttaacagtgaaagtgcagcacttgtagcggcagaaggatatgcagcagaggatgtaacttcttatgtaaagaagatcgaatctgtaacagttgacggaacagagtatgcggcaacaggaaaacgtgcagtgaagatcatcaaagaagatggaacaattgacacaactgcggctccgtttaaggatgcagaaaacggacaggaatttaagatctcagtaaaggcaacaggctatgcaaaggattatgaattcacttatactttatcacaggagagtgagtatacttacgcatatgtaggacttagctgggcagagtactgggctgctgaaaatgtgcaggcagcaggagatacatcttcttcagatgcaaaggattcaaaaggagagtctgacaagggtgcattcgatactgtaacaagagctacagtaaatcatggacttcacagaggttctttccagtgcaacgcagtaatcaaggcggaaaatggaaaagagtatgcagtagagtactggacagatggaactactgcagttctgacagacggaagcaagattacatttaacagaggagagatcacagaagaatccggtgcaacaacaaagatgacagagtatgatgtactcggactgaaatatgtgccggtgaaagtaaaaacatctgatctggatgcactgaaagtaagctatcgtgtgatcgaaaacggaagtgaacttgcaggaggatattcagaaaagaatctggtgagctatacaggactggttgccaatgtaacagagaatacaaacggtttgaaaacagcaacaaagaatgaggatgaatctttcagtttctctgcaagagtgaatcatggatcagagtccggaatcaaagatcaggcactcaagacagcaccaacagcagaggaagcagggctgacagtaaaagaagcaagcggatcttatggagaattcttaagagttgatctgacaggaaattatggtgatcttggatcaaatctccagactgttacatggacttactatggagatgacagtacatatacaaatgcaaaagctacttatggaacaaaatttgcagcagataactggatgcacaaagcaatgggaatccagcttggactgacaaattctcttcgttgtacacttccagaaggaacggatggaacaggatattggaccattacactgacagcacttggatataatgacgtgacatacaaattccaggcgacagaggagaacattgtaaaagcatctgaggataaaacaatcacaacaacagagcttgaggcagctattgcaaaagcagaagccctgaaagaagctgaatacacagcggaaagctgggcatctatgcagatggaacttcaggaagcaaaagatgaattgaaaaatccaaaaactcaggcaactgtagacgaggcagtaagccacctcaacgcagctgttgaagcacttgttaagatagaagagccggcagcagttgatacttcttcccttgagaaagtaatcagtgatgcggcagctctgaaagaagctgattacacagttgacagctggaaggcattgcagagtgcactgacagacgctaagagcgcattaaatgcaaaagaaagccaggaaaaagttgataaagcaacagatgcgttaaatgcagcaatcaaagcacttgtaaagaatggaaaccaggcgggaagtcagaatggaagtgcaactccgactgttacaaagaaggcaggaacaactacggatggatcagcttccaaaggaacaagtggatcaaaagccgcaaagacaggtgatccggcaaatgttcttggcttattaggacttgcattctcctcactcggagcaggagttggcggatttgcatggaagagaaaaagaaaataaagacaagaaaattgagaaaattttcaacaatttcgcgaaaaagattaaaatagtgcattgacactattgctttaaagtgataaactcctagcaaatggaataacgctttaaaccgatgaagcggagatcaaagtaattatgcgcgcacagagagtccgggaagctgagagccggatcgagatgcaggttgccaaatggaccgctgagggcacagtcaaaggatttgagaatccgagtactctgtgacgtgaggcatacgtcagttgccggagatatgttagtatcttacagagcgcatgggagtgtacccgtgaatcaaggtggcaccgcggaaaagatttagatttaccgtccttgacagaataggaatattctgtcagggactttttttctaccataaacatatatttcctatcgggataaaagagaaattcattttgcagcataacttcaaggaggaatacacatggacaagacattagaacaaatcagatcctacgctgaacaaggcagatacaagcgagttccaatcagcaaagagctgtatgcagatgcatttacgccgattagtgtgatgcggacgctgcgggcggcaagcaagcattgctatctgctggaaagtgcggaggacagacagcagtggggaagatattccttccttggatatgcaccaacgatggagatcacttgtaccgatgggcgtgtgatcatcagcgaagggcatgaagatgaggataagaccagacgggaagttttaaccgaccatccgggaaaggttctaagagaaattctcgaagcatataaaagtccggttgttccgggacttcctccatttaccggagggcttgtcggatatttttcttatgactacatcaaatatgcagaaccgacattaaagccagtcctggaagagaagaatgagactacaggaaagacagcagcaaaaacggcagtaagagatttccgggatgcggacttgatgttatttgaccgtgtcatcgtatttgacaattacagacagaagctgatcctgattacaggcgtgaagctggaaggtgatctggaagaaaattatacgaacgcgaagcaggaattagaagagatggaacgattgatccgaagcggggcgcaggcagatttccgaccacttgttttagaagaagagttccatccgggagtggataaagaagattattgcaagatggttgagaaagctaaggaatacatttatgaaggtgatattttccaggtcgttttatccaatccgctgacagcgaaggcaaaaggaagtctttttgatacctaccgggtgcttcgaacctcgaatccatctccgtatatgttctacttttcaagtgatgatattgaagtggcaggggcttcaccggagacgctggcgaagtttgaaaacggacaggtgtgcacttttcctcttgccggtacaaggaagcgaggagtgaccgaagaggaagatcaggaattggagaaagagctacttgcagacgagaaagagcttgcagagcacaacatgcttgtagatcttgggcgaaatgatgtcggcaagatcagccagccgggaacagttaaagttgataaatatatggaaatccagagatattcccatgtaatgcatattggttccaccgtgacagggaaaattcgggaagacaaagatgcgctagacgtagtcgatgcgattctcccggcaggaacgctttccggagcaccgaagatccgcgcatgtgagattattgcagagcttgaacaggagaaaagaggcatctacggaggggcagtcggctatctcgattttgcaggaaatgtagatacatgcatttccatccgtcttgcttataagaaaaatggatacattcgtgtacagtcaggagccggaatcgtagcagacagtatcccggaaaatgaattccaggagtgtttaaataaggcaggggcagtacttcaggcagtggaaactgcgaaaggaggattggaatgatactattactcgacaattatgacagctttacctataacttatatcagtttatcgcaagagtagaatcagaaataagcggcatacaaaaagatcagattgattcaaaagtaaaggtcgttcgaaatgatcaaatcacaccggaagagattctggaacttgcgcccgaggcgctggtaatctcaccggggccgggaaaaccttctgatgccggaatctgtatcgaagcaattcagaagctgaaaggaaagattccaatgctcggggtatgtctcggacatcagacgatggcagaagcgttcggagcaacggtaagtcacgccggacagctgatgcatgggaagacatcacagctgaaagacgtaaagacagacagtgtcctctttcagaatctgacacttccaatccaggtggcaagatatcattcactcgcagttaaggaagagacactaccggaagaactgattgtgacagcgcgaagcgaagataacgagattatggcgatggaacacagagaatatccgatctttgggttacagtttcatccggaatcggtgatgacaccgcagggacttcagatgatagagaactttattaactatgcaaaagtattgaaggagaattaagaaatgatcaaagaagcaattattaaattatcaaagaaacaaaatcttacctatacagaagcagaagaagtaatgaatgagattatggaaggaaaggcatctgatgttcagaagtcagcatatctgacagcactttccatgaaaggtgagacaatcgatgaaatcacagcatcagcagcgggaatgcgtgcacactgcatcaagcttttgcatgacatggatgtgttggaaatcgtaggaacagggggagacggagcaaattcatttaacatttcaacaacatcctcccttgtgattgcggcagcaggaattccggtcgcaaagcatggcaaccgtgcagcatcctccaagtccggtgcagcagatgtgcttgaagcacttggcgtgaaaattgacgttgcaccggagcgcagcacacagcttctcaaagacattcagatctgtttcttatttgcacagaattatcatattgcgatgaaatatgtcggaccgatccgtaaagaacttggtatccgtaccgtattcaatattcttgggccactgtctaatccggcaggagcgaacatggaactgatgggagtttatgatgaaagccttgtagagccacttgcaagagtcatggcgaatctcggagttgtccgcggaatggtcgtttacggacaggataagttagatgagatttccatgtgtgcaccgactacagtctgtgagattaaagatggaacatttacaagctatgagatcacaccggagcagtttggttatgagagatgcgaaaaaggtgtactgacaggaggaacacctcaggaaaacgcacagatcacattggatatcatttctggaaaagagctgggagcaaagagaaatgctgtttgcctgaatgcaggagcagcaatctatcttgcaggaaaagcagattcaatcgaagcaggtgtaagaaaagcagaacagatcattgacgaaggacttgcactgaagaagctggagcagtttaaagaagaaagtaataaataaaaagtctgatccccggctatgcaggggagaatggaagaagcaacttgaaagaaaaagaggaacaaatagtatgaatatactcgagaaaattaccgagcgcacgaaagagcggatcgaagaagaaaagaaaatagttccattagaagaggttcgaagacaggcggaagaaaaaggaattaaagatcaaatccctgcattcgaacaggcacttcgggcagacggattatcctttatctgcgaggcaaagaaagcttctccttccaaaggattaatcgcaccggattttccatatgttgagatcgccagagactatgaagcaggcggcgcggcagcaatctcctgtctgacagaaccgttttggttccggggcagtgatgagtatctgaaagaaatcgtgcaaaatctatccattccggtactcagaaaagatttcacctgtgatgaatatatgatctatcaggcaaaagcaatgggagcctcggcagtacttctgatctgttcggtattagaagatggcaggttaaaagcgtatcatcagctggcagacgaactcggattatctgctttggtagaaacacataacgaagaagaaatcttaagagcacagaagatcggtgcaaagattatcggtgtaaataaccggaatctgaaagatttcacagtggatatcaagaatagcattcggctaagagaaatggtcagttcggaaacagttttcgtatctgagagcggtatccgcggagtggaagatatgaaagcactttatgaaaatggaaccgatgcggtactgatcggagaacttctgatgagaaaatctgatcggaaagcagcactgatggagttgaagcagcagacaggaaggcagctagatatgaattagcggaagatatagtatgagacaagaaaaaatgaacatgcccaagattaagatctgcggtttgagccgcccggaagatattacctatataaatgaggcaaaaccggattattgcggatttatcatcgatgtgccaaagagccggagaaatgtatccatttcgaaagttcgtgaactggttcaaaatcttgaatcgcagatttgcccggtcggagtatttgtcaataaagactgcggcgaggtcgcacaattattaaatgaaggaaccattcagattgctcagcttcacgggcaggaagatgaggcatatataaagaagttgaaaagtctgacagaccatccggtgatgaaagcattttcgattcaggagaaaaaagatcttgatgcggcggcagcgagcagtgcagatctgattcttctcgatcacggaaaaggcggaaccggcgagacatttgattggagtcttttggaaggatggagaaagcggccgtatttcctcgcaggaggactgaatccggagaacataccggaggcaatacagcgaatacacccttggggaattgacctgagcagtgcagtggagacagatggaaagaaagatcgtgggaaaattcttcaagctgtgaaaactgtgagaaattttgaaagcagtaaacattttttggaaaacaaaaaagtatacaaataaatgaataaatttactaaaacaatagaaacaagaaagaaggagagacaaccatgacaaaaggaagatacggaatccatggtggacagtacattccggagacactgatgaatgcagtgatcgaattggaaaaggcgtacaactactataaaaatgacaaagaatttaatgacgaactgaatacattattaaatgaatatgcaggcagaccgtctcttttatactatgcagcacgtatgacagaagatcttggcggggcgaaaatttatctgaaacgagaagacctcaatcacacaggtgcccataagatcaacaatgtgttaggtcaggttcttcttgcgaagaagatgggaaagacaagagtgatcgctgagaccggtgcaggacagcatggagttgcaacagcgacagcagcggctctgatgggaatggaatgtgaagtcttcatgggaaaagaagatacagagcgtcaggcactgaatgtatacagaatgcgtcttctcggagcacaggtacacgcggttacaagtggaaccggtactttaaaagatgctgtttcggagacaatgcgtgagtggacaagaagaattgatgacacacattatgtactcggatcctgtatgggaccgcatccatttccgcagatcgtgcgtgattttcaggcagttatatctaaagaaatcaaggagcagatccttgaaaaagaaggaaaactcccggatgcagtgcttgcctgtgtcggcggaggatccaatgcaatcggtgcattttataatttcattgaagatgaaggcgtgcgcctgatcggatgtgaggcggcaggacgcggcgtgaatacagcagagacagctgcaacgatcgcgactggtaagcttggaatcttccatggaatgaaatcttatttctgtcaggatgagtacggacagatcgcaccggtttactcaatctcagccggactggattatccgggaatcggaccggagcatgcagatctttatgataagggaagagcagaatatgtagcaatcactgatgatgaggcagtcgatgcatttgagtacctttctaaattagaaggaatcattccggcgatcgagagtgcacatgcagttgcatatgcaagaaagcttgcgccgacaatgggaaaagaccagattattgtaattaatatttcaggacgcggagataaggactgcgcagcaattgcacgttacagaggggaggatcttcatgagtagaatacaggaagcatttaaagggaagaaagcatttataccatttgtcacatgtggtgatccggatcttgaaacaacaaaacaaatcgtctatgagatggagaaagcaggggcggcgttggtcgagcttggaatcccattttccgatccgacagcagaaggaccggttatacagggagcaaatctgcgtgcgctgacaggaggcgtgacgacagataagatcttcgatatggtaaaagaaatccgtcagaatacacagattccacttgtttttatgacatatgcaaatgttgtgttctcttacggaacagaaagatttcttgagaaagcgaaaaatgtcggaatggatggtctgattcttccggatgttccatttgaagagaaagaagaatttgacatcgtgtgcaaaaagtacggaatcgatctgatctcattgattgcaccgacttctcatgaccgaatccggatgattgcaaaagaagcatcgggattcgtatattgtgtttcctcacttggtgtaacaggaacaagatccgcaatcacgacggatatcggagcaatggtgaagcttgtaaaagaggaaaatgatattccatgtgcggtcggattcggaatctccactccggagcaggcggcgaagatgtgtcagagcgcagacggtgcgatcgttggaagtgcaatcgttaagttgtgtgagaaatacggaaaagactgcgtgccgtatgttgccgaatatgtaaagagtatggttgaagcttgtaaataagtgaaaaggatatgagattcgaaatccgagtattcttttaataacaataggaaaatacctcttttgataaggagccagatgtggtatcatagatattagatttgttgcttgatctatgatacgaatccgaaaggagactacgaatgaagaatcgaaaacagcctttattcaaaagctttggctatgcctttgaaggaatctggacagggatttcaaaagagaggaatatgaagattcattgccttgcagtgattcttgtaacagcagttggaacctttgtaggattaacaccgatggaatggtgtatctgtcttctcctttttggaatggtaatctcactggaacttgtgaatacggcagtggaagctgttgtcgatcttgtgacagaagagagaaagccacttgctaagatcgcgaaggatacggcagctggtgcagtgctttttacggcaatcatggctgtgatcatagggtgtatcatatttatacctcatttcattgcactactgtaatgtaaagaaaagcaaccagaaaggaaaacaaagagatggatgagaataaagtaattgtcagtacagagatgaagcaggcattggtgaatctgcgaaatctcgaagagatttatgtgatcatgtcaggtgtgacgaagatgccgtttgtcctctgcgatgaagagacatttgatgacgaggttctggtttattatcaggaagagtctgcaaaggaaaaggcaaagacgcttgcagaagatcgttatcatgtaggaattgccaagattgaaaagaatgccagacttggattttttacaaacctgtatacaatgggtgtgaatgcactggcagtgaatgttggtacagaggaggagatcagggttcagctggaacatcttgtagttcgtaagaataaggaagaattgcctgaaggaaagaaactgatcgagaatccggagcttcatctgacagcaatgtatctgatgcaggagatgcaccgcaatatcggaccggagatgccggagaatgtgaaggaacttcaggaagagatgatggcgcattataagaaaggaacctttatcgtaggagttcaggaagataatcaggttccacttctgagacagccggacggaagtctgtatcagccgatctttacagatatgatagaatttaccagatttgcacagggcaagaagatgaagacagcagcaattccggcggataagattccggagatactgattccggatgcaaagggagttgcaatcaatccatttggtgtgaatgtacgtctggatattacaaaagcaaataagcaaaagccagaagcgtaaaatgaagagaagttaatttaaatcaaaagaaaaactttaatttactaaaataatcactaagtaacatattcaacaaataaacaggataaatattgttgaatattacagattgactgttggaagtgagtatggttatactatacgtggttaaaagagaaaagcgcacgatagagtgttactggtaaagcaggcataaactatccttaataagttcaccagataaggtggatttagttattgaggattagtttatgccttttttgcgcattatagtataggataagtaagttgcagaactgtgccagcacaagaaactatgggatgcgtcaactctgtaagaaatgatactaggaggattacagatgaaagacaagatttttggagtattgcagagaatcggaagaagttttatgcttccaatcgcaattcttccggtagcaggacttctgcttggagtaggaagttcatttacaaatgcaacgatgattgagacatatcatcttcaggcaattttaggcgaggggacaattctgaattccctgctcacaattatgagcaaagcgggaagtattatttttgataacctgccgatcatttttgctgtcggtgtagcaatcggtatggcgaagaaagagaaggaagttgcggcacttgcggcaatgatctctttctttgtaatgaatgcaacaatgaatgccatgcttctgatccgtggagatcttcttgcagacggaacacttggagccggagttctggaaggaactgtgacaagtgtctgcggaatccagacattacagatgggtgtatttggtggtattatcgttggacttggagtagcagcacttcataataagttttacaaaatccagcttccgaatgcactgtcattcttcagtggatcaagatttgttccgattatttcaacattgacttatgtagctgtcggaatcgtactctattttgtatggccaaccgttcagaatggaatctatgcacttggcggacttgtaacaggaacaggttatattggaacattgatctttggtattattaagagagcgttgattccatttggacttcaccatgtattctatcttccattctggcagacagcggttggaggaacaatggaagttgcgggacagctggtacagggcggtcagaacatcttctttgcgcagcttgcagatccatccacagtacatttcagtgcggatgcgacaagatatttttccggggaatttattttcatgatctttggtcttccgggtgcggcacttgcaatgtatcagtgtgcaaaaccggagaagaagaaacaagcaggcggacttctgctttctgcagcacttgcatgtatgatgaccggaatcacagagccactggagttctcattcctgtttgtagcaccgatcctttttgcggtacaggtgatccttgccggatctgcttatatgatcgcgcatatgttaaatattgcagtaggacttacattttccggtggatttattgatctgttccttttcggtatccttcagggaaatgctaagacaagctggatcagaatcatcccggttggaattatttatttcttcttatattatatcatcttccgtactttgattctgaagctgaatctgaagacaccgggaagagaagatgatgatgcggaaacgaagctgtatacaaaatctgattataaagcaaaagtagatggaaatgatgcagattctgaaaatgaaatgacaccggaagatcagaagagcgcactgatcacaagaggacttggtggaaagaaaaacatttctgatgtagactgctgtgcgacaagacttcgttgtacggtagtaaagccggaactggtaaatgaagatgtcttaagaatgacatccccatccggaatcgtaagaaaaggacagggaatccaggtaatctacggaccggctgtttctgttattaaatccaatctggaagattatctggagaaagctccggatgtggaatatcttccgggagaaaacgaaaacagcgcagaagaaacgaataaatgtgcagaaacaaaagatgaagcgaagaaagatgagaacaaaactgttgcagccggaactgtaaagaaagagctttgctctccattcacaggagtggcagcaccgatcgaagaagcgtgtgacgaagcatttgcagggaaaatgatgggagacggttatctggttcgcccggaagagggagtggcttatgcgcctgaagatgcaactgtatcttttatcttcccatcaaaacatgcagttggtctgactagtgatgacggaaccgaatatctgcttcacattggcgtggatactgtaaatctggatggaaaaggattcgaaacttttgtaaatgacggagaccgagtaaaaaagggtgacaaactgataggttttgatataaaatatatccaagagcatgcaaaatccgatgaatgtatggttgtatttacaagtcttcaggaaggtgaagagatcagaatgtctaagagcggaaaagtagagaagcttgagaagacagcagaaatcgtaagcttgaattaagagaaagagaggctccggggggatgtatcgagtcattaaagttctgaataataatgggattcttgtatatcatgttgagacagggaaggagatgatccttctcggaaacggtgtgggatttggaaagaaacctacagaacagatcgagaaacttcccggagccaaagtatattcccttgtcacaagaagaaagcaggagtctgttctgaaaacagtcaatggaatccgcccggagtttattgaggcaacaggaaagatcattgaagaagcagagaacgtgtttcagaagatcaatcatgagatgctgcttccgttggcagatcatattgcgcttgcagcgaagagagcgaaggagaaccgccagcttccgaatccatttacaccggatatccgtgtgttgtttggagaggagtatcaagtggccctgaaagggcgggaaattatacagcagctgacaggatatgaaatctcagaggatgaagtcggattcattacgctacatatccatgcaggtctttcagatgaggcagtatcccagactctggatgcgaccagaattgtaaatgaagggattgccatgattgaacaggaattcgatcagaagctggagagcggctcacttgggtgtacacgtctgatgagccatatgtattatatgattctgagaacccgtaaaggcgaagggacgaatgcagactttaatgattttatttttcagaattacccaaggaccggagaggcggcgaagaaagtgtgtgactatatgtccagacagctgaaacagccggtcgcaaaagaagagatcggatttcttgcaatccatatccagcgggttatctcgccagatacggtatgaccgtgtgctcttgaaatactgtatactatgatatatagtagtggataagagcgaaaggagaatccgcagaatgtataagattctaatcatagaagatgaccttgtgatggcaggggcaattaaaaaagagatggaagcgtggggaaatgaagcacgttatgtggaagattttgcaaaggttcttgagatatttgcagagtacggtccacatctggtgcttttggatatcacgcttcctttttataatggataccactggtgcagcgagatccgtaagatatcgagcgttccggtgatctttatctcttcagcagcggataatatgaatattatcatggcgatgaatatgggcggagatgactttgtggcaaaaccatttgacttaagtgtactgacagcgaagattcaggctctgctgagaagaacgtatgatttgtcaggaaaagtgccgatgctggaacatagaggagcaatcctgaacctttatgatacaacaatgacttataatggagaaaagattgagttgacaaagaatgaatttcgcatcttacagacattgatggagaataaaggacgcgtggtcagcagagacacgctgatgacaaagctgtgggagacagacaattatatcgaagagaatacattgacagtcaatgtcggaagacttcggaaaaagctggaaaaagcgggactggaaggctttatcaagacgaaagtcggcggtggatatatcatcgagaaggagtaaaaatgtttttacaatatttgaaaagaatccgatttgtgcttctgtggagtttgctgtgtgcgggaatctttttcctgatttttgtgttggaagagattaatctgaaggcagcggtttatccgacagtgttgtgtctggcgtttggattactttttttactttgtggatatttgcggtataagaaaaccaggcagaagctggagcatttgctgcaaggagaaggaccttatgaggattcgcttccggtggcacaagatgggattgagtcaggatatcaggaactgatcaggaaagaagaacaacagcaaagaaaagaacatgccagatgggagaagtccggtcaggacatggaggactattatgcaacctgggtgcatcagatcaaggcaccgattgctgtgatgaatgtattactccagcaggaagataccgagacgaatcagaatttgaaagctgaactgttccgggtggagcagtatgtggagatggcacttgggtatgtgcgtcttgacagtggcacgaaggatctagtgatcgcacggtatcctttggatgaaattgtaagaaaatcgatccgtaaatatgcaggacagtttattcgaaggagaatccgtctgatctatgaagggacagaccagattgtgctgacggatgagaaatggctttcgtttattattgaacagttgttatccaatgcagtgaagtatacgctgaaaggaacagtgacgatcactgtcagtgaagaaaagaaactgacggttacagataccggaatgggaattgcaccggaagatctgccgagaatctttgaaaaaggatatacgggatataatggaagaatggaacggaaatcaacgggaatcggtctgtatctgagtcagatggcggcaaagaaactggggcatcagattacagttgagtcaaagttgggggaaggcagcagttttacaatagatctggcagagtatccgttgagagcagagtaaatcactaaatcacacagagagaagcaagtgacaaaattgtcacatcagacagctagaatgtcacagaaatcaatgttggcattctggctgtattgctatactgaggatgttgaaagaaagaagaggaggtcgtaagaaatgacagttttggaagtagaaaatttgaaaaaaatataccgtccccgttttggcggtaatcaggtacaggcactctctaaggtgacattctcagtagaagagggcgaatatgtagcaatcatgggagagagtggctcggggaagacgacattactgaacatgctggcagcattggataaaccaactgaaggggaagtttatctggatggaaaaccgttatcagcaatccgtgagaaggatctgtccaagttcaggagagatcatcttgggtttgtatttcaggatttcaatcttttggatacatttaatctaaaggacaatatcttactgccattggtactgcagggagttgattacaggaaaatgaatgtcaggatgatgccaatcgtgaaagaacttggaattgcaggacttctggagaagtatccgtatgaagtatcaggaggacagaagcagcgtgcagcagtggcgagagcgctgatcacagatccgagactgatcctggcggatgagccgaccggggcactcgattcgaaatcaacggatgaattgctcggggtatttgagcggatcaatcaatcgggacagacgatccttatggtaacacattctgtcaaagcagcgagcaaggccgggagagtgttatttattaaagacggagaagttttccaccaggtatataaaggcgaacagacagatgaacagttctatcagaatatctcagcgacacttacaatgcttgcgacaggtggtgagagacgatgaaaagtggactttatctgaaactttccgttaatggaattaagaaaaataagaagctgtatcttccgtatttgatcacatgtatctgtatggttatgatgttctatctgatcgattatcttgcagtgagtccgcagtttgcccagatcaaaggtggggatactatgcagatgatccttggatttggttccggtgtgatcgcaatcttttcgctgatccttctgtattacacgaattcatttctgatccgcagacgacagagagagtttgggttgtatcacatccttggaatgggaaaaattgaccttgtaaaaatcatggttcttgagaatctgatcatcagtgttctgacgattgcaggaggaatcgtgggaggaatcctgttctctaaattaggggaacttctggcagcgaagatacttggaagtaatgccggactttctatgaaaatcagtgttccggcacttgtggctacggcactgttattcctggtcatttttgcattaatcatgcttcggatgatcgtgtccgtctatcggttaaaacctgtagaacttttaaaaagtgaaaagacaggagagaaacctccgaaggcaaactggatctttgcagtactcgggttgcttctgcttggtgtggcttattatttatccctgacaatcaaagatccgcttgtagcgatgatctggtttgtggttgccgtcgtgctggtaatccttgcaacgtatctgttatttattgccggctcggtcacattttgtaaaataatgcagaaaaagaaaggatattattataaaacaaatcattttatttcactttcatccatgatttaccgtatgaaacgaaatggggcaggattagcgtctatttgtattctgtccacaatggttctggttatggtatcttctacaaccagcctgtatctgagtatggaacatggcttgaatcttcgatatccgaaatctgtccagattgagatgtacacgaaaccggagcagacggaagaaatgaaagagaatcagaatggacagattatagagcttgtacagaaggttttgaaagaacataaccagaccgcggagaatccggagaattaccggatgcttacagtcagtggaattgtttcaaaaaatgaaatctattttaatccggagaatgctccgggagtcaatgaagtgaatacatttgatcatttaaaaatgttctatgctctgccgttggaagcgtataatcggatcatggggacgaatctggagcttgcttccggggaagcgtatctgtatgcgaaagattccgatttcccctatgatcagatcacggtggagaattccgggacatggaggattaaaggacatttggataaaatgatttcaaatggaaataatatggcaaatatgaacagcagcttctatctggtggtttccggactggaagatataaaagctttggaagaaggaaatgtttccgtttacggtgtcaatggttcttatgagaaatggtactacaattttgatctgtcctgtggagatgaagagcagatccagattcaaaacgagattgacaagaaaatcaatgcattggctgaacaggaatcagaggaatcagataccctattttttggagcttctacagacagcagagccgcatcaagagctgattaccaggctttgtacggcggtctgttcttccttggaatccttcttggagtcgtattcattcttggaatggtgctgatcatttattataaacagattacagaaggctatgaggatcaggacagattccagattctgatgaaagtggggatgacacagaaagaagtgcgtcagacgatcaattctcaggtaatgacagtattcttcctgcctcttgtggctgccggaattcatacggcatttgcatttccaatgatagaaaaaatggtgcatctgcttgctttttctgacagaaaattcctgattctggtgacagtgtgctcctatttagtatttgcattattctatatcattgtctacatggtgacttcgaaacagtattacaaaattgttagcggaaaacaggaagaaagtcttttttcttaattcaaagagtgatagaatagaattatcagaaaaaggaggacttgcttatgatggatcacacaattattacaattggaagacagttcggaagtggcggtcatgaagtaggaaacagactggcagagagactgaacattcctctttacgatcacaatctgattcgaatggcagcaagagatcttggaatttcgaacgaagatgctggaagagtagatgagacgagacttggaaatgtgttatcaagctattatattggaatgggtgattatactacatttatgctcagtccggaagtggagaaaccattaagtgatcaactttttgacgcacagtcagcaatcatccgcaagctggcggaacgcggaccgggaatcttcgtgggacgctgcgcagattatgttcttggggattattcaaatgttgtgaatacatttatctatgcttataaggatgatagaatcaatcgaatcatggatatctataagctttccgagaaagaggctgtagataagattaagaagattgacagagagagacgcctgtattatgaaggtagaacagaccgtaagtggggcagtattgaagcgaatgcaattctgctgaattcaagtcttcttggaatcgatggtgcggtagatgcacttgaggcgatttatcataagtgggaaaacagataacaaaataagcagaaaaaatgaaataattaacaaaaattaagagggtgtcgtttagtgcgacaccctctttgctacgtctttattctggaatctgtatttatttcatcatgccggcaagaatctgattgacttctttaccatcagctttgccttttaccttcggcatgagttctttcatgatcttacctttatcctttgctgtaggagcatcgataccaagatctgcaagaacggatgtgatcactgctttgatctcatcttcgctcatcatctttggtgcatattcttcaagaacagcaagacgcttctgagcctcttcaatcagatctgtacgatcttcaggtgtcatatcaattgtttcttttaactgtttgatttcttttaagattacctgtccttcttcctcttctgtcaggtcggcacgtttgtcgatagctttattcttcagagaggagagcagaaaggaaagtgcggcttttcgttctttgtctcctgccttcattgcagcgaccatagcgcttctgatttcatcaattttgctcattttagagtcctccttataatttaatatgcttgaaatagttacaattattgaaaagagcggattgctcttgattcataagataaattttagcagatggtggtttatattgcaagagtgcactctgttttgtgaaaatatatgaaaaaaatgcatgaaaagtataaaaaatcagaaaatttacgaaaagtaaaaatataggttgacaatatttggctcgaggagtaaactacgtgacataaaagcaaaggcgctttgagaaacagatctcagagtgcctttttcttttaataaaatatggtacctataagatttgccgcgaacagcagcaagtctcaatgacacaaaggcgtgtcttacagaaagaaccgattcagggggatggttcaacgaaactgtaagatacgtctttttagtttctaggtatgaggaggaagtagtatgacacaagaaattattactcagattacagacacagtcggaacagaagtgttcggcatctggttcctgatcggagctgcatttgtattctttatgcaggcgggattcgctatggtagagacaggattcaccagagcaaagaatgccggtaacattatcatgaagaatctgatggatttttgtattggaacaatcgtgtttattttccttggatttggattgttactcggggaagatgcacttggcggactggtaggagttccaacacttggaatctttacagattatgcaaactttgactggtctaattttgtattcaacctggttttctgtgcgacagcagcaacaatcgtatcaggagctatggcagaaagaacaaagtttctttcctattgtatttattccgcaatgatctccgcagttgtgtatccgatcgaagcacactggatctggggaggcggatggctttcacagcttggcttccatgattttgcaggatcttgtgcaatccacatggtaggtggagtaacagcatttatcggagctgcaatggaaggagccagaattggtaaattctcaagagataagaatggaaaagtaacaaaagtccacgcatttccaggacataacctcgtaataggtgctcttggatgtttcatcctctggtttggatggtatggattcaacggtgcggcagcaacaacaggcccacagcttgcatctatttttatgacaacaacaatcgcaccggcaacagcaaccgttgtatgtatgatcttcacatggcttcgttatggaaaaccagatgtgtctatgtgtctgaatgcatccctcgcaggtctggtagcaatcacagcaccttgtgatgtgacagatggattaggagcactgatcattggagcagttgcaggagttctcgtagtatttggcgtttggttctgtgataatgtagtgcatgtagatgacccggttggtgccgtagcagttcattgcttaaatggtatctggggaacaatcgcagttggtctttttgcaacaacaaatgcgccggaaagcacactgaaaggtctgttctacggcggtggattcggacttctcggaacacagcttcttggtgtagtaacagttcttgcttggacagttgtaacaatgacaattatcttcaaagtaatcgatatgacaattggacttcgtgtttcagaggaagaagagattgttggtctggattccaaggagcatggtcttgcatcagcatatgcaggattcagcatcatggatattacagaaggtgcaatgaatgaaaatgaaaacacagatcttggtgtagcagattatgacgcagcatctccaatccagagagcagcagctgtacctgtagccggaccggtagatgcagatacaggaatgcataaagtagttattatcgcaaagctttccaagtatgacaggctgaaatcagcgttgaacaatcttggtgttacaggaatgacagttacccaggttatgggatgcggtatccagaaaggtgccggcgagaaatatcgtggagttgagatggacgttactgttctgccaaaggtaaaagtagaagttatcgttggaaatattccggttgagaaagtcatcgaaacagcatccaagacactgtatacaggacatgtcggtgatggtaagatctttgtatacaacgtgcagaaagtagtaaaagtacgtacaggagaagaagatctcgaagcattgaaagatgtagaataatacttgataaaaaaaataatctcccaaaagcagtaaagactgtttttccggagattattttttatgattattgaacgattttttgaataatttttttttataaataagattgaaatcttatatactactatatttaataagaagtaacagcgtaaaaaacaacacaggatggtaaaaattacctaaaaattttttagattatcatataatttgaaaagaaaaatgtgaaaaaaatactattttatgtaaagagagttaaataaatataaaatttttctttaaaaagctaaaaaaatgtgatatagtgtaatacaaacatatgatattgaaattcaggagggaaaattaagaatgaacaattatatgtatctggttccagttgcagctgtcattgctcttctttttgcagcatatcttgcagcaaaggttagcagacaggatgccggaacagaaagaatgaaggaaattgccggtgcaatcgcagatggtgcacgtgctttcctgacagcagagtacaagatccttattgtattcgtagtagtacttttcgtactgatcggattaggagtaggtaactgggtaacagcagtttgcttcgtagtaggtgctctgttctcaacaatcgcaggttactgcggaatgacagttgctactaaggcaaatgtcagaacagctaacgcagctaaagagagcggaatgaacaaagctctttccatcgcattttcaggtggtgccgttatgggtatgtgtgttgctggacttggtgcacttggtgtcagccttgtgtacatcgtaactaagaatgtagatgtattattcggattcagccttggtgcttcttccatcgcattgtttgcacgtgttggtggtggtatctatacaaaggcagcagacgttggagctgaccttgtaggtaaagtagaagcaggtatcccggaagatgatccgcgtaacccggctgttattgctgacaacgttggagataacgtaggtgacgtagcaggtatgggagctgaccttttcgagtcttactgtggatctctgatctcagcactgacacttggtgttgcagtaagcgaagtttcaggagtattattcccacttgcaatcgcaggatgtggtctgatcgcttctatccttggaacattcttcgtaagaggcggagagaacacaaatcctcagaaagctcttacaaaaggaagctatgcttcttcagcaatcgtaatcattgcttctttagcacttagctgggtgcttttcggaaacatgaacgcagcaatcgcagttatcgctggtctgattgttggtgttatcattggtaacatcacagagtactacacatcagcagattacaaaccggttaaaggaatcggagagcagtctgagacaggtgcagctacaacaatcatcagtggtcttgcagttggtatgaaatcaacagctatcccgctgcttctgatctgtgtaggtatttttgtttcttataatgtatttggtctgtatggaattgctcttgcggcagttggtatgctttctacaacaggaatcactgttgcagttgatgcatatggtccgatcgcagacaacgctggtggtatcgcagagatgtccggtcttgatgagtccgttcgtgacattacagacaagcttgactctgtaggtaatacaacagcagctatgggtaaaggatttgctatcggttctgcagcacttacagctcttgcgctgttcgtatcttatgcagagacagtaggtctgaaatccatcaaccttcttgactacaaagtaatcatcggtatctttatcggtggtatgcttacattcctcttctcagcattcactatggagtctgtatctaaggctgcatattcaatgatcgaggaagttagacgtcagttccgtgagaaaccaggcatcatgaaaggtgaagagaaacctgactacaagtcatgcgttggtatttctacaacagcagcacttcacgagatgcttcttccaggtctgatggcggttatcgttcctgtagtagtaggtgttcttcttggagttgacgctcttggcggacttctttcaggatccctcgtaacaggagttcttatggcgatcttcatgtcaaatgcaggtggtgcatgggataacgctaagaagtatatcgaagaaggaaaccacggcggaaaaggtagtgaggctcataaggcagccgttgttggagatactgtaggagatccgttcaaggatacatcaggtccgtctatcaacattctgatcaaacttatgacagttgtatcacttgtattcgctccactgttcctttctatcggaggacttctgtaatacttttgtcatccatatatggatgacattaagaatataagttgaaagaaaacgttctccggggatttccccgggggacgttttttttctgtgttgcttttacttgttttgttatataactataaaactggcctgtataaatattttaaaactggatatatctaacagaccagggcgctgatataataaggcggtatgttgggaaaattcacttacaagtctcacggatgttcgacttgaatactcaacataagagataacaaacaggagatttacaaaatatgaaaaacgaaagtatcagcacaaagaaaatcgtaatgactgcattttttgcagctattatttatctgggaatccagtctttccgtattccgcttccggcggctgtcggaacaccatttctgcatttcggacacattttcgtaatgcttgcagtattaatgcttggacctaagctttcaactgtggcaggagttctcggacttctcgtctttgatgtattgaacggttatattcaggcaatcccgaatgtattcgtcagcacaattatcaaatgtctgcttgtgggcatgatctttcagtctctgaagaaaaaagctcagggagatgcgaagaaggaatatggttatgcagtcctctgtgcggctatctacggcattacgaacattatcgtagactttatctggtcaacagttgaactggttgttcttggaagttcctggagtgcagcgttggcggcagagattacatctatcccggctacgatcatcaatgcaggatttacagtagtaggaattgcgattctgtatgttccggtgaagaaggcttaccagagaatccttggagcataggaaattaataagccaggaagtcaatgtcatagcacatatgtctgataatcaaaaaggagaattattaagttggatattgcaaagatacagatcttattacaggaagcagaattagacggttggttgtttacagatttccagggacatgattttatcacaaaagagtttcttgagcttggaaatcgtttctgtacaagaaggatgttctatctgattccgacgcagggtgaaccagtcaaggtgctttcagcaattgagccgcatctccttgatcatcttccgggagagaaaatgttatatcatggaattgaaggacagaagaaagtgttgtcagagttattgaagccgggcatgaagattgcctgccagtactctccgggcggaaatgtcccgacaatcagctctatggatgccggcctgatcgagtatcttagaacttacggaatcgagccggttacaagtgcagatctgatgcagcacttcggtgcagtactaacggaacatcagatagagacacaccgacaggccggagttatcatacataagatccttactgatacattttcttggatcagagagaatatagatgcaggtaattatattgatgagtatgcgatgcttcagcagatgcaggaactgatagggcaggagaatatctatatggattctccgccgtttttcggagttgatgagcatgcctgtgatccgggatatgaaccgaaagaaaatggttcgaggcagattcgtgaaggcagcagattgatcatagatattgccggacgtcttccggaagaggatgcggtatattatgatgtatcctggtgcatgaatgtcggagaaaagattgatccggagtacaagaaatggtttcagatagtatatgatgcacgtgaagatgcaagacagtttattcaggcgagattagatgaaggagaaactgtcagaggatatgaagtagaccgcaggctgaaagaacggtttgaacagcttggatgtgcacagtatctgatgcaccggacaggacataatatcggtcatagatgtcatggaattggtgccaatctggatgattatgaaacacatgatgaccgctgtctgctccctggtacgatgttttccatagaaccgggactgtatacagataagtatggtgtgagactggaatatgatgtgcatattacttcggagggagaaacgaaagtgtatggaccggtgcaggatgagattcttgtgatttgatcaagggtgaaagaaatatagttgaaaaagtgaaagaaatggcgaagatttgtaccagtaaggtgtaagcttcgccctttttgttaaatacaattcttgataatgtataataggtgtagtattcttattagaaataatacatcagtaaaagaaataaacaggaggttattcaaaatgaaacaagtagagacaacaagagaagcaataatcaacagacgaagtgttcgcaagtataaaactgatatgattccaagagacataatcgagcgaattgtagaggcggggacttatgcagcaaatggaagaggacaccaggcatctattattctggcagtgacaaataaagaattacgagacagactttcagagatgaatcgtaagattggtggatgggatgaaggatttgatccgttttatggagcacctgtggtattggttgtactggcagagaaagactggccaacacatgtgtatgatggaagtcttgtaatgggtaatctgatgctggcagcacatacagaaggaattggaagttgttggattcatcgtgcaaaggaagagtttgaaagtgaagaaggaaaacagattttgtctgatcttggagtgacaggagagtatgaaggtatcggacactgtatacttggatatccggatgaagaaacagcagaggcgaaaccaagaaaagatgattatgttttttgggtggagtgatagcccataaatataatagagggttactcaccatagcttcaaactatgacaaatgcataaatttatatatttttcaaaataagcatggaatgataagatgattgcagataaaacatcacttacaaaaataaaaggagaattaatttatgagtaaatatcagacaccatgcagatacgattttgtgggaagttttttgagaccggaagaggttaaaaaagcgaatgcagattatcaggaaggaaagatcagcgaagcagaaaagaatcagatcattgataaagcggttacagaagttgtagcaaagcagaaagagcttggatttcatgtgatcacagacggagagttcagaagaacttactggcatctggattttatgtggggatttgaaggtgtcggtcatgaacagaccggcagcggggtacagtttgatggagagctggcctcactggaagatacttatctgacaggaaagataaaggcaaaggcgcatccgtttgtagaacatttcaaattcctgaaacagtttgaggatgagaacacagttgcaaaatatacaattccggcgccggcgcagatgttccagcagatgattattccggtcaactataaaaatacgagaaaatattatgagacaaacaaagaactgatccacgacattggaacagcttatcaggaagtgatccgtcagttctatgaagcaggatgcagaaatcttcagcttgacgactgtacctggggagcaattgtcggagatgcggcaaagcagagatacaaacttcttggaacggatattgaagatgtgaaaaaagagcttcttgaagtgaataaccttgcactggaaggaaaaccggaggatatggtaatcacttcccacatctgcagaggaaattatcattcaacattttttacaagcggaccgtatgattctgtagcagattatgtctttgcaaaagaaaatgtggatgcattattccttgaatatgatgatgcaagatctggtggattcgctccgcttgcaaaggtatctccggataaaaaagtggtattagggttaattacaacgaagatacctcagctcgaggagaaagaagttgtgatcaagagaattcatgaagctacaaaatatatcccattagacagactttatctcagtccacagtgtgggttcgcttcctgtgaaatcggaaacaaactgacagaagaggaacaatgggcaaagttaaagcttgtgaaagaaattgcagaagaagtctggggagagtaataagagttgagttgctgcttatacagagtgtaaacggcaactcaatttttatgcacaatacttcttcaacattcttctggccattttttcatcttctccatgaataacgaggagaaacggaagaccaagctggatcgtggcaagctcagaaagatcttttccgttgatatctacgcgattgtggttctcaagatcctggatgcgcacatccgaagaaagatttttacaagtgtgtgaaaaagtgagaaattgtccggttgtgagaaatttaatgttttgcttgatcatgatatcgcccctcgtaaatgaatgtgtttgattttttcgtcattcagtatataataaataacaaagaaataaaaatacatatttgttatgacagatatacattttttatatgatttatcagatgtggtttgactcccacctctgcaggtggagagtaacagattagtgtcagtttaggggggacttatggaaattacttatgattattaccggattttttattatgtagcaatgtataagagtttttctaaagcggcgaaagtattgatgagcaaccagccgaatattactcattttatgaataatctggagaatcagcttgggtgtaaattgtttgtcagatctaatcgaggagttacgcttacagcggaaggagagaagctgtatcagcatgtttctgttgcatatcagcatcttcatgcggctgaagcggaacttgcaatggagcgaagtatggagagcggaagtatcacgatcagtgcgagtgagattgcacttcatcttttacttcttcctatactggggcgctttcataagcaatatccgggtgttcggctgagacttctgaatcattccacaccggaggcagttgagtccgtcaagaacggactggcggactttgcagttgtgactacgccgcttcaggcaaagaaaccgttgaaaagtacttctttaatgtcttttaaggaaattgcagtgggagatcattcttttcaggagaaagaaaaaccaatgaggctgaaagacttaattgagaatccgttgatttctcttgggcagggaagcacaacctatgagttctattccaaatttttcctggagaatgatctggttctatctccggatacggaagttgagacgatcgatcaggtgttgccgcttattatgaatggactgggcattggattccttccggagctgttcgtaagaccagtgatcgaggaaggaaaggtctgtcagattccactaaaggagaatattccggagagagaaatctgtctggttgagaatcatacatttccaccaagcattgcggcggatatgttcaaaaaaatgttacttctgaaataaggtattgtttaagaagatattgcggatccaatctattcctatgtagaaaatatatatcagatatgtgaataaaacagtatgcgccggtttgactttgaaaccggcgctttctatattaataagtgggactttgttctgtttaacaagcaaaagacaaacaaagaaataataaaggaagtgtaagtatgcagacagtattaccacgtgaagaagctgtagaagcggttatatctaaggttctcggttcacaggaggcttgtgaccggttaaatgaagtgttttatgagcatttggaaaactatcaggagataaatgacgatggcgacagacattttgcagaggtcttgctccaggcgtataaaaatggagatgtcagcgcgttgctacttgaattgtgcggaggaagtatgtttgatctgcttcgggacgcatatctgattccaaagaaatttcatggaaaatcaggagagaatccggttctcctgactgatgtagagggaaagcttctggagagtaagaaaagggaagtaacagctcatgaatatgaaaagttccatgagacgtacaggcaacatcaatgtgcaccgagatcaaaactgtatcttgctgacggatatgacatagttcgttcctatacagagggcatgcagattcaggagaaaaaagagaacaagaagcgtggcgtgatggcgttatatgcattaccggataccagaaagcttggactgacagaagcacaggcctatgcagttgtctgggatactttccagaagattcagaaacaggctccgagagtggaagtttattatgggcaggataccggtgagaagcgtcagaaaggatttgacgagataggagttttacttccaattcatggatttgagaaacgaatgcttcatcatctggatgagattgatgggattgttctttcatgcagagagaagatgatgaaaaaggccggagcggaaagccttgacctggaataaaggggaagtgaatgagatgcagactcagaaaataagaaaaaatcatatggatattctctggcatgaatatacagataaaggtggagaagaaacaccagtaacacaagcaagtttgacggagaaagcatcaattgtcggaagagtggggattatgcttctctcctgtggaaccggagcttggagagtgagaagttctatgaacgctctggcagaagagatggggataacgtgtacagcggatattggtctgatgtcgattgagtatacctgttttgacggtgacgatggattcacgcagtccttgtgtttgacgaatacgggcgtgaatacatcaaaattaaacagactggaacactttatccgtgagttcgagcagggcggacaggatatgtctggtgaacaactgcataagctgctggatcagattgaagagattcacggactatattctccaattgcattgggaatggcagcagcattggcatgcggtggatttacatttctgcttggcggtggattgattgaaatgttctgtgcatttatcggtgccgggattggaaattttatcagatgtaaattgagtaaacatcattttacattgtttttgtgcatagcctcatctgtttcggcagcctgtctggtttatgcgggacttttgaaagcagcagagcttttgtgggcaatttcaattcagcatgaggcgggctatatttgcgcaatgctatttattattcctggttttcctttcatcacaagtggaattgaccttgcaaaattggatatgcgttccggaatggaacgactcatgtatgcactgatcattgttttggtagctacaatgtccgcgtggatcatggcgttgatcttaggattacagccggtggattttctgaagcttgacctgacgcaggcagaatggattgttttccgtctgcttgcaagcttttgtggtgtgtttggattctcgattatgttcaacagtcctacacgccttgcggcagtggcggcaggaatcggtgcgattgccaatacactgcgattggaactggttgatctgacggcattgcctccggcggcagcagcatttgtcggagcattaacagccggactcctggcaactatgattaaaaatcaggtcggatatccgagaatctctgtcacggttccgtcgattgtaatcatggttccgggattgtatctgtaccgtggattttataatctgggaacaatgaatctttctgtatcagcttcctggtttgcggcggcaatactgattgttgcagctcttccgttagggttgatctttgcaagaattcttacggataagacatttcggtattgcacgtaaggagaatatatacaaaaaaggaacagttccaggtgggactgttcctttttgatgaaatagaaaggaatttatttctttttatcttttttcttgtctttgtctttcttctttccggaagatttctcgttgtccttattcttctcgctatccttcgcttttgcagagaatttcttatctgcttcagcttccggctgatatccgttgatatcatatttcttttcatattcctcaaaggctgtaagataagtttcatccttcagcttgcggacactctttgtatattcatgaatatcaaagttagaagaatcaagctcgagaatcgctacagcaacgttagaacagtgcgctgcgatacgctcgtagtttgtaagcaggtcattaaaagcaaatccggtattcagatcacactgaccatttctaagtctcttaatgtgacgaagtttcagatcattacagagaataccaatcagttcgcgcagaggttcaacctttgcagcagtctcaagatcttcatctacaaaagaatttactgtaagatcaacaatctcaaccaatgccttctcaagcacattcagctcataagtagcagattcagagaatgtacgggacttttcatgaagttcctgggcaactctggaaatgttgactgcgtggtcaccaagtcgctcgaagtcactgatcgtatgaagaaacttggaggtctgtttcgcctgatcaggtgtcatatcatgcatacttaactgcatcagataagtaccaagtttatcctcgtacttgtcgatcatgttttccttttcctggatcttattgaacttgctgtcgctaaagtctgtcagaagttcgaaagcgcgcatgagattcttgcgggcattctttgccataccgttaacagccatctggctctgactgatcgccagcggcgggtaatccagaaaacgttcctcaagcagatcaaaatcagcctgctcttcgttgtcctcgtctgtatccttgatcaggaagaagacaagcttctcaatcttgctgataaatggagcaagaatcaggatcgtagcgatacggaataccgagttcaataaagcaatgttgacaggactcatgaccatgtccataaatgtaaagtggacagcggcatttactgagtaaaatacgatagaccaaaagatcattccgaataagtcattcagcaggtaaataagtgctgtacgctttccgttcttgttcgtaccgatagaagaaagcagtacaggacaggcagctccgacaccgatacccattgtaataggcagtgcggcagcaaatgtaatagagcctgtgattgataatgcctgaaggataccgacagaagcagatgcactctgaagcactgcagtaaatgcgataccaacaaggatacccataaatggattcttaaacattgtcagaagactgacaaaatgtgggttctctttcagaggtgaaactgcaccactcattgtctgcattccgaacatcaggatcgcaaaaccaagcataatgtcaccgatatcggaataaggtttcttctttacgaatgtacggaagatgataccgatgatcgcaacaattgcagagattgttgcggtggacagaagctgcgcaatgccattggagccatcaatgtaagaaagacataaaatccagcctgtgatacttgttccaatgttggcacccataatgattccgattgcctgagcaactttcatcataccggagtttacgaatcctacgaccataacagttgtagctgatgacgactgaatgatcgctgttactactgtacccagcagcaatcctttgattggggagtttgtgagcttgtataagataagttccagtttgttaccggcaaccttcttaagactgtctcccatgagtgccattccgtacaggaagagggcaactccgctgagcaaggacaaaaccattgtaattcccattttcttttttcctttttcttaagttattaagttgacatgttacgtcttgcaaaaaattacgtacatggctattataaaacactttacccagagtttacaattattttctttaaactttacagaaaaatattgattgcaaattgcagaaaaattgtagggataaacaaaatattaatcttaagcaaaaaagtccttgacttgtccatggataatttccatcagatgagttctcgcttccacgctcgcccaggcaatgtgtggtgtgatcagcaggcgtttactgtctttgatcttgagcaatggattatctgcggacattggttcctcacaaaggacatctaatcctgctgcggcaatctgatttctgaccagtgcattatataatgcctgctcatcgacgatcggtcctcttccgagattcaggaaaatacaggaagatttcattttttcaaacgctttgctgttgatcagtccttctgtatgctcgttgagtggagcgtggacggaaataatatcagattgcgtaagcaatgtctcaaagtcaacctgttcataaccttcctgcgccggagcaccggaggcggagtagtaaatgactttcgctccaaatgcacgtgcaatctcagcaacacgtctgccgattgctccaagaccgatgatcccccaggtttttccatggatttctgtgaaatgttctgcaaaatgagtgaaagagacatcatttacatagcgctcttctttcacataatcatcataatagcgcagtttttctaatagaaagagaagcattgcaaatgtgtgctgtgcgacagtctcagtagaataaccggcaacatttctccaggcaattccttttgaatcaagatattccttatccaggttgttcgtgcctgtggctgtgacacagacgagcttcagattctttgaagttccaatagtctgctcattaaccggaactttatttaatatgatcacatcggcatccgtgacacgcgccgggacttcttcagatgaagaaaagctgtactttacaacttcaccgagttcatcatatgcagaaagatcaatatcttctccaattgttttgacatctaaaaatacaattttcatttaaaatctccttgtttcataatcagtattaagtattttatgatgtgagtgtcaaaagtaaattttgccgctcactgatgtaaccggatttctccattgctatgcatttccgcacttacatcattttatcacaaaaagaacataatttcttatattttaccacatactaatcaaaaattgattatggaggttgttaacagttaaatataaattataaagtcatataagccggtgttgagctttataagatattagagtagaatattattgaaaggagttgatactttgagtaaatattattctatacatgaattttcaaaaattataggcgtatctgctcagacgttacgaaattgggatgccaatggaaaacttcatccgcatcatactacagtaagtggctatagatattattccgatgagcaactcaaccaagtaataaatgtaaagcctaaaaatcgcattacaattggatattgtcgcgtttccagccgtaaacaaaaagatgatttggaacgacagattgataatgtcaagacatatcttctagcaaaagggcagccgtttgagataataagtgatatcggttctgggattgattataagaaaaaagggcttcaggaattgatcagacgaatctctcaaaatcaggttgaaaaggttgttgttttatataaagacaggctattgagctttggttttgagttgatagaatatatcgcttcactttataattgtgagattgagattattgataatactgaaaaatctgaacagcaggaacttgttgaagatctggttcaaataatcacagtatccagttgcaaattacaaggaaaacgagcgaacaaagctaagaaacttatccgggaattgatacaggaggaaacagatggtaagagccataaaagtaatgttgataccaaacaacgtacagaaaactaagatgtttcagtacgcaggagcttcaagatttgcttataactgggctttggccagggaaaaagaaaactacgaaaagggtggcaagttcatttcagattcagaactcagaaaagaatttacaaagcttagacattctgatgaatacgcatggttattaaatatttcaaataatgtaaccaaacaggcaatcaaagatgcctgtactgcgtataagaactttttcaaaggtttgcaaaaattcccaagattcaagtccagaaagagatcaatgccgaagttctatcaggacaacgttaagatacaattcagtaatacccacgttaagcttgaaggtttttcttccagcaggaaagcaaataagcaaaaaaagaattgggtaagacttgcagaacatggacgtattccaacagatgttaaatatatgaatccgagaatatcctttgatggattgaactggtggatcagtgtatgtgtagaatttcctgactgcaaggaaacacttaacgatgatggagttggcatagacttaggaattaaagacttagctgtctgctctgatgccgttaagtataagaacatcaataagagtcagaaagtaaagaaactagaaaaacagaaacgtagattacagcgtagtatctctcgttcttacgagaaaaataagaaaggggaaagttactgtaaaacaaataatgtaatcaaaaaggaaaaacttttattaaaacgaaatcacagattaacaaacatccgtaaaaactatttgaatcagaccatatctgagatcgtaaatcgaaagccaagatttatttgtattgaagatttgaatgtcagcggaatgatgaaaaatagacatttatccaaagcagtacaggaacaaagattttttaggtttagacaacagcttgaatacaaatgcaatgataaagggatccagcttattgtggctgatcggttttatccatcatcaaagctttgcagctgctgtggaaacatcaaaaaagatttgaagttatctgacagggtttatagatgtgaatgtgggaatatgattgacagagatttccaggcatctataaatctcaaggcttatggagaacgatttgcaagctaacactgaaacgttaatgcaaatatgtacggatacgttagtccggaatttacgcctatggagagtacaagaacttgtgagtagatagatatttatatcatcaaaagcatactcgttgaagtaggaatgaaacatggaagtttataactttttataagttttcagtaacggaaatgtgtcatgaaagccacagggatagtccggaggatagatgatcttggaagaatcgtaattccgaaagaaataagaaggacattgcggatccgcgaaggtgatccactggaaatttttacagacagagaaggaaaggtgattttaaagaaatattctccaatcggtgaattaggaacactggcagggatttatgcagatagtctttcaaagacacttgattgtacagtctgtattactgatacggatcaggtgatcgcggcagcaggaaacgggaagaaagaacttcaggaaatgctgttgagtgcagagctggcagaagtgtttcaagaaagaaagaccgtgttgaaaaagagcagtgacgctgagtttgtagcaattacaaaagacaggagtgaatacagcgaggaaataatcagtgtgattctcagtgaaggtgatattgcaggtggagtgatctttctgcagaaaaatgagaaaaagcattttggagagatggaaaagaagtttgcggcaggcgcagcagatctgcttgggaggcagttaagttaaaagtgtcatatttttccgggaggatgcatagaatagtatcagtggaaaaccggacatgcatcgaaaggaaaagaaaatgagagaaaatcatgggaaaaaagggataatatacgcagaaaatttagtgaaggcattactttgcgcctatctggtcacaggaatgtttctgttaattcttgcacttctcctttataaagcaggattgagtgaagaaaatgtgaatttgggaattattctcatttatgtaataggaactttttccggtggttttgtgatgggaaaactggaaggccaaaagaagttcctctgggggcttggaaccggtgtggtttattttgttctattactgctcatctcatttggaatgtaccgtgaggtttcgtcagggacaggagatttgtttctgacatttgtactttgtaccggaggcggaatgctcggagggatggtctcatgaagaaaaaccaaagggatgtgtgaaaaaatactttaaaaacctggctgtgtgtgctataatagcgaaagcaatatgtgcgaagttaggaggagtaaaaatgaaacacattaaaacactgaatacacagacactgaacaacacagttaaaaaaggtggatgcggagagtgccagacatcttgccagtctgcatgtaagacatcctgtacagtaggaaaccagacttgcgaaaacgcaaaataagaaaacctgaaagtgaagataatgttgctgcagagttgctttgagtggtgatactgcctgcaattatgcgaaaaacagcaacaggattacaggtgaggcagcggtgcaaatcgctgccttaagcatgttttagaagtatctgcttagagctgcattgtgaaaatgccgggctttgaacagttacaaatagatttacaaatacatatagaaagcgaggtatccacgtgatacatcagtaccagaacaatggatataatatcgtcctcgacgtgaacagcggagctgtacatgttgtggatcaggaagcgtatgatgtcatcgaagtgcttaatcgcatgaatgaagatcatacagtggagacattgaaatctccggaaacagcagaagcattgaaaaaagagcttggagagaaatattctgagaaagatctgctggatattttagaggcagtaacagaactgacggaacagggacgtctgttcacaaaagacatttatgagagctttatcgacgttgtaaagcagcgtaagacagttgttaaggctttatgtcttcatattgcacatgactgtaaccttgcctgtaagtactgctttgcggaagagggagaatatcacggccgcagagctttgatgtcttacgaggttggtaagaaagcacttgatttcctgatcgcgaattcaggaacaagaagaaaccttgaagttgacttcttcggtggtgagccgctgatgaactggcaggttgtcaaagacctggttgcttacggaagagagcaggagaaacttcatgacaagcatttccgtttcacacttacaacaaacggagttcttttgaacgatgaagttcaggagttcgtgaacaaagagatggacaacgttgtcatcagtcttgacggaagaaaagaagtgaatgaccagatgcgcccgttccgtaacggaaaaggaagctatgatctgatcgttccgaagttccagaagctggcagagagccgtaatcaggagaagtactacatcagaggtacatttacaagaaataacctggatttttccaaggatgtagaacatttcgcagatcttggattcaagcagatgtcaatcgagcctgtagtaggtgatgacacagaaccatatgcaatccagaaagaagatcttccacagatctttgaagaatatgataaactcgcaaaattcctgatcgagcgtgagaagagcggaagaggattcaatttcttccacttcatgatcgatctcgaaggaggaccgtgcgtgtccaagcgtctgtccggctgtggttcaggtacagagtatctggcagtgacaccgtggggagatttctacccatgtcatcagtttgtaggacaggaagaattcctcatgggaaatgtcgatgagggaattacaaaaccggagattgcggaagaattccgtggatgcagcgtatattccaaggaaagctgcagaacctgctttgccagattctactgcagtggtggctgtatggcgaattcttacaagttccacaatacgatccatgatacttacgaagtgagctgtgagatggagagaaaacgtgtggaatgtgcgatcatgataaaggctgccctggcggatgaagaacaataaagttagagagcagcagtcaagaaaggaaagaaagagatgaagaaaggtaagagtattctcagcctcattctcgtaatcgcagttacagcactcttcggtatgacctgtgtgcttggacttgatttaaagggaatgggagctgcgaagaacatcaatctcggtcttgacctggaaggcggagtcagcattacatatcaggtaaaaggtgacaagccatctcaggcagacatggatgacaccgtgtacaagcttcagaaacgtgtggagcagtacagcacagaggcacaggcttatcaggttggagacaaccgtatcagtatcgagattccgggtgtgagcgacgcaaacaagattctggaagaacttggacagccgggttcactgtactttatcaagcataaagacagtgagggaaatgaaaactattccctgacagcttccggatatacactgaataagtcaatcgacgaactgaaagatacagactccatcgtactgacaggtacagaagtaaagacagcttcagccggagtactcaacgactcaacaacaggaaataaaaagtatggtgttgatcttgagttgacagatgagggtgcagagaagttcaagacagcaacagaagaagcttataacaataaccatgacacaatcgctatttactatgatggttctctgatcagcgtgccaagcgtaaatgcagtgattgagaatggaaaagctcagatttcaggaaacatggattatgaagaggctgataacatcgcttctacaatccgtatcggtggactgaatctggaacttgaagagcttagctcagaagttgtaggagcacagcttggacaggacgctctgaaaggaagtctgatcgcaggtatcatcggtctggcaatcgtatgtgtattcatgtgctgggtatacctccttccgggacttgcatccagccttgcactgatcctttacacagaattgatcctgatccttctgaatgcatttgacatcacactgacacttccaggtatcgcaggtatcatccttggtatcggtatggcggtagatgcgaacgttatcatcttcgcccgtgtgaaagaagagctgacagcaggaaagagcgtacacgcttctctgaaatcaggattccagaaagcgatgtccgcaatcgttgacggaaatatcacaacactgatcgcagcaggcgtgctgtggcttcgcggaagtggtactgtaaagggattcgcccagacacttgcacttggtatcgtcgtatccatgtttacagcactcgtgatcacaagactgatcatcttttccttctatggagcaggcatccgcaatgagaaagtatacggaagacatctgaaagaacgtaaaccagttgatttccttggaaagaaaaagattttcttcattgtttccatcatcctttgcctggccggaccggtcatgatgggcgtgaaccatgcaagaggaatcggcgcaatgaattacagccttgattttgtaggcggtacttcaacaaatgtaacatttgataaagaatatacactggaagagatcgacagccagatgatcccaagcctggaagagatcacaggagataagaatattcaggttcagacagtaaaagacagcaatcaggtagttttcaagacacagacacttgatcttgagaaacgtgaagcacttgcttcttatctgaatgagaactacggggtagaggtatctgatatcgctacagagaatatcagctcaacagtaagttccgagatgagaagagatgctgttatagctgtgatcattgctacaatctgtatgctgctttacatctggttccgtttcaaagatattcgtttcgcaacaagtgctgttgtcgcactgatgcatgacgtacttgtagttcttggattctatgtgatcgcaagagtatctgtcggaaatacatttatcgcatgtatgctgacaattgtcggatattctatcaacggtacgatcgttatctttgaccgtatccgtgaggcgctggcaacaaagagccgtacagaagatctgaaggatcttgtaaaccgctgtattactcagacactgacaagaacgatctatacaaactttacaacatttgtcatggtcgttgctctgtatatccttggtgtaagctccattaaggaattcgctgcacctctgatggtaggtatcatctgcggtggatatacatccgtatgtatcacaggtgcactgtggtatgtgatgaagacaagacttggtgaggaagcgaaggctgcgagagcagcttccggcacaaagacagtttctgtaaaagcagcagacaagaaagaaggaactacttccacagagagtaacgcagcagatacatctgcagacgacagctccaagaagaaaaaaggaaagaagacttctttcaagaacaaaaagagcaaaaaacgctaagaaataaatagcagcctggaaacagtaacgaaatagaatctgccgtatcggaaatgaaaaatgattttcgatacggcagatttttgctataataagaaaatatgatactgacagactggagggtatttggatggagaaatggttcgtcgcaatgaaaaaggcggattttaatggaatagcagagaaatatcagatttccccgatcattgcacgactgatgaggaaccgtgatgtgatcggagatgaagcaattgatttttatctgaatggaacggtggaggatctgtatgacggcttactgatgaaagatatggatcgtgcagtagatattcttaaggagaaaatagaagagggaaagaaaatccgtgtgatcggtgattatgatattgatggagtcaatgcaacgtatattttgcaacaggggcttgcaggacttggggcagatgtcgatacggatattccagacaggatcaaagacggatatggattgaatcagatgctgatcgaccgtgcactggaggatgatgtagacacgatcatcacctgtgataatggaattgcggcaatgaacgagatcgcttacggaaaagaaaatgggatgacgatcgttgtgacagatcaccatgaagttccgtatctggaagaaaatgggaagaaaaaatatctcctgccaccggcggatgcagtggtcgatccgcacagagcagactgtgagtatccatttaaagggctgtgcggcgcagctgtagcgtataagctggttgaggttttgtacagagtgtctggaaagtcagagcaggaggtagagcatctgcaggaaagactgatggaaaatgttgcaattgccacgatcggtgatgtgatggatctggttggagagaatcgtgtctttgtgaaaaagggacttgagcttctgaagacaacgaagaatgaagggcttcacgcattgatgcaatgtacaggggtagatacagcgaacctgaatacttatcatatcggatttgtgatcggaccgtgcatcaatgccggcggaagactggatacagccaagcgtgcactggaactccttaatgcatcgaaccggagagaggcagtgacactggcagcagatctgaaagaattaaatgacagccggaaagaaatgactgaagaaggtgtagaagaagctgtccggcagatcgaatcaagttcctggaaggacgaccaggtgctggtcgtgtatcttccagagtgtcacgaaagtatcgccggaattattgcggggaggataaaggaacgttattatcgtccgacctttgtactgacaaagggagagacaggggtgaaaggttccggacggtcgatcgaagcctatgatatgtttgcggaaatgagccgctgcagggaattatttacgaagttcggagggcataagctggcagcaggactttctttagaagaggaaaatgtcgaagttttccggaaacggatcaatgaactggcggatctgacagaagaggatttgcagatgaaggtgtcgattgatatgcggcttccatttccatatattaatgaagagctgatccatgagcttaagatattggagccttttggaaaaggcaatgggaaaccgttatttgcagaaagtaaactgcgtgtgatccagccaagaatcttcggaaagaaccggaatgtgctgaaatgcagactggaggaccagcagggaaatcagatggaagcggtttatttcggagaagtggaagactgtctgcagaagatggaaaagaaacagatcatgtcttttacatactatccatccatcaatgagtacatgggacgaagaacaattcagcttacaattgtcaattatcagtagataatatcaaaaaaacagtacaaattgcttaaaatgaagaagaatgggaagttcttatttgaaaaagggaaaaatagtgatatactaaatcatattaattgttcagaactaaggcgttttgtgtctaaaatgcatttgtcggatatgccatactgacgaaatacgaagcattttggaagttggatttgaacagaacacaggatgaatgaagggggaagatgatatggcaggcactcgggaatatgaagatctgaataaaaatctggagatagtggacgggcatgcagtaaaagcaccggaggattatcaggatccggaggagttatatcaggccttaatagctcgtgtgcgtaagtatcacccttctgcagatattacgatgatcgagaaggcctatcagataggcaaagaagcgcataagaatcagttccgtaaatccggagaaccttatatcatccatccactctgggtggcaatcatacttgcagatctcgagatggacaaagaaacgatcgtggctggaatgcttcatgacgtggtagaagatacgacaatgacactcgatgagatctcagcagagtttggtgaagaggtggcacttcttgtagacggcgttaccaagctgggacagttgaactattcccaggacaagctggaggcccaggcagagaacttaagaaagatgttccttgcgatggcgaaagatatccgtgtcatcattgtaaaactcgcagaccgtctgcacaacatgcgcacaatggagtttatgacaccggcaaagcagaaagagaaatcaagagagacgatggatatctacgctccgatcgcccagcgtctcggtatttcaaagatcaagacagaactcgatgacctttctctgaaatattatcagccggaagtttataatcagctggtgcatgatctgaatgcacgtaagacagaacgtgaagaatttgtgcaacagatcgttgctgaagtatcaaagcatatgaagaatgctgatattgaagcgaaagtatacggacgtgtaaaacatttcttcagtatttataagaagatggtgaatcagaacaagacacttgatcaggtgtatgacctgttcgctgtccgcattatcgtagattcagtgaaagactgttacgcagcacttggtgtgatccatgagatgtatacgccgattccgggacgtttcaaggattatattgctatgccgaaggcgaatatgtaccagtctctgcatacaacgctgatcggaccttccggacagccgttcgagatccagatccgtacagaagagatgcataagacagcggaatatggtatcgcagcacactggaaatataaagagacaggcggaagcaacacgaaaggactgaacacacaggaagagaagctgaactggctgcgtcagatcctggaatggcagagagacatgtctgataaccgtgagttcttaagcctgctgaaaggtgacctggatctgttccaggaagatgtatactgcttcacaccgaacggggatgtgaagaaccttccgaatggatccacgccggttgacttcgcctatgcgatccacagtgcagtcggcaataagatggttggtgccagagtgaatggcaagcttgtgaacattgattataagattcagaacggagaccgaatcgagatccttacatctcagaattccaagggaccgagtcgtgactggctgaatatcgtcaagagcacacaggcaaagagcaagattaattcatggtttaagaaggaatacaaagaagataatattatccgtggaaaggatctgatcagtgcctactgtaagagcaaggggattaatctgccggatatcatcaagccgaagtatcagcagatcgttcagaagaaatacggattccgtgactgggatgcagtacttgcggcaatcggacacggcggactcaaagaaggtcaggttgtgaaccgcctgctggaagagtacgagaaagagcataagaaagagatcacggatgagaatattttggagaagatctcagaagcgaataaacagagagtccacattgccaaatcaaagagcggaatcgtagttaagggaatcaatgatatggcagtacgcttctcaaagtgctgtaatccggtgccgggagatgagattgtcggttttgtaacaagagggcgcggaatgtcgatccacagaacagattgtatcaatatcatcaatctttctgatgtggagagatcccgtctgatcacagcagaatgggaggataatgatctcgaagaaggcggtcagtatcttgcagaactgaagatatttgcagacgacagaagaggacttctgctggatgtatcaaaggtatttaccgaagagaagattgacgtgaagtccatgaatacccggacgagcaagaagggtacggcgacaatggagatgggatttgttgtacacggaagagaagaattgaatcgtgtgatcggaaagctcagacagattgaaaatgtaattgatattgagagaacaacaggctgatggaggaaaacgaatgaaggttgaaagtattgtactggggtcaattggaacgaattgctatattgtaaccaatgaagagacgaaggaatgttttgcagtggatatggcagaatgtccgcaggaatatgtcaattatatcaagaacaatggactagaaatgaaagcattgtttctgacacatggacattttgaccacatcatgggaatcgatgatttcctcaaagcctttcctgtgccggtttacgcaggcgaagacgaacttccggtgatcgaggatgaccgcctgaatgtttcttgtatgtacggaccgaaatacgcattccacggagcacagcctgtaagagacggtcaggtgatcgaatgcgcaggaattgaagttgatgtacttcatacaccgggacataccgtaggaggatgctgctattaccttccaaaagaacatagattgttcagtggagatacgctgttctgtgcttccatcggaagaacagacctaccgacaggaagcagcagccagctggtccgctctgtacaggagaagatcatgacacttccggatgatacaaagatctatccgggacatatggaagagacatcagttcagtttgagaaggagcataatccattcatatgataaagatagaaagtaagaagaacaaatttacttataacgtataccatgtcacaaaagcattttatccaaaagaggatatcgtgcagacagtagatgagaagcaagaaccactggtgaagatacatttgccggaagggacttgcttttcccttgcaccggaagaatgcgtgcagacagaagatgtgcaggaagagaaacgcgatgtaacgaagaaagtctatcagtttctctcaaagcagacaggacaggaacttgcctggggaatgctgaccggagtccgtccgacaaagcttgtaatgcagaaaatcgagcagggaatgacaaaagaagaaatctttgattttctaaaagaacaatattgtgttggcgataaaaaagcacagattgcgtatgagattgcatgccgtgaaaaggcacttcttgatcagttggactgtaaaaatggctatagcctgtatgcaggaattccattctgtccaagcatctgctcctactgctcattcagctcttcaccaatcgctgagtggaaagatcaggtcgattgttaccttgatgcgatgatcaaagaattgaaagctacggcaaagctgatgcagggaaagacgctggataccgtatatatcggcggcggaacaccaacaacactcgaggcagaccagcttgaccgtttgcttggaacgatccgggagaattttgacctggagcatgtgcttgagtttacagttgaagccggaagaccggacagtatcacacgagaaaagctcgaagtgattcgcaaatatcctgtaacccgcatctctgtcaacccacagacaatgcagcagaagacactggatcttgtcggaagaaaacatacggtagaagatgtagaacaaatcttcaacctcgcacgtgagcttggattcgataatatcaatatggatctgatcgccggacttccgggagaagatgcggcagatatgcaggatacacttgagaagatcgagaagcttcacccggacagcctgacagtacacgcactcgcgatcaaacgtgctgcgaagttcggtcaggaaggaagaacgatggatccggggactgagatcacacagatggtcgaggcggcagcagcgtcagcagaacgcatggggcttgtgccatattacctgtatcgccagaagaacattgccggaaacttcgagaatgttggttatgcagagcaggacaaggctggggtgtataacattttgatcatggaagagaaacaggccatcctagcttgcggggccggagcatccaccaaacgtgtatggaatctaccggatggttatcacatcgaaagatgcgagaatgtcaaggatatcaagcaatacatcgctagaatcgatgagatgattgaacgaaaaaaagcactttttgagaaggattgaaaatgaaaaatacctccataaaaagggctggtacattatttgtacattaaattagttcaaaaatctgtgaaaatcagtgctaaataatactaaatttactatatgacgtacaagaaaacctaataaccttaccttaaaagacgaattcattatgctaaatgagttcgtctttttttctgttattgtttaaaacttgcgaaaggaggaggaaaaatgacatgtacagcgttaggaggaaacagcagatgttaaagatacgattaatgggaacgaaaagtgatattagatggtttcaaaattttttgcagattgattctgacatagaggtcttagaattgatggtaatgcaggccgcccaacagagaatggaaaaagcaatcggaaaaacaataccgaaaaagcaaataaaggcaccagttccaccgatcaaagcaaagtatcctatcatggattggaagaatcttccgtttaatacagcagtctggaaagaatccgaaaaacttgcaggaaaaagaaggatataaacatccggtgcgtgtcgtatataatccaaaaacaatgacctatcgaaccatcttaaataaatcaaagttccaagtgaaagaggaatggaatttgtccggaacgattgaacagtgtattattcgatatgcatcaaaattagatggagatcagatgaatgaaatcttgttggggttggaagaaggaatgactgatgagcaggtgaaatcttattttaaattaccagcagatcaaatgaagcagtatcgaagagaacagctagagaaagaataaaagaatctaaagcggaaaggagtttgtcaattctttccgctttagatctattagtgaatcgcttttattattaatcttcttttaaactaatgtaacggtacacagtggattcagaaagttctaattgtttggcaatttctgagatagcacctttcatacgcggaattccttggtttgtaagttcccaaacgatttccattttttcctgtctggtcatgcgttcaggcggaatattagagtcagcaatcgttttagaaataatagattctgcaaaagaaacaattggaacatctagattttcttctaccatagtggtagatccagtaatagtttctcccattgtcatggaaactcccattggtaaacaaccgacaaattgctgagccgctttcatgaaatttgtgataatggtagtatctgtatttaaacaaagcatgccaattagttcaccattattttttatataaaaagtagaagcgatgaaatcctttcctctcgcttttgcagtgtaatttaccaaatagtcttgtgtcgtatacgcttgattgtttgtgacttggaatgcaaagtctgtaagcgaacttccaatggttcgtccagagtggaatccgttttgaattgcaataacagaatgttctggattagacacatcatgtagcacaatttcggtgttttcacctaatatttcactaaaaaaattgacaatagggacgaaaatggaaagaatctctttgttagtcattatgaatacttcctttactgtttttataattttaatatacatgttatacaaaaataagtcaataaaattgtaataatagtaaaaaattatttttttgataagaaattattgtaaacaaaaacgtaggggtgtaagatgtgattaacagaaaaaaataagggaggtgaacctaatatgaaggaaaaaattgaatcaatgaaagctccagcagcaattggaccatattcacaggcagtgaataacggtggattggtatttgtatcaggacagttaccaatcgattgtgaaactggtgaatttgtatctgatgacgtatcagatcagacacgtcaatcgctcgagaatattaagtcaattttagccgaagttggatacgatatggatcggattttaaaaacaactgtataccttcaagatatgaacgatttttcggcaatgaatcaggtttatgagacatattttacagccccatatcctgctcgagcagcatttcaagttgcaaagcttccgaaaggtgcaaaggtagagattgaagcagttgcaatgtgagtgtttacgaaaacgagtaaactaaaggaaagatgagaagaggtgcatcttatggatgaaaacaaaaaattagagtttcgtggtagtagttttatggcattagttccatttgcaatctttattgttattacaattgcattatcattctttaatgcggctgatacaaacatgatgatcggcgcaggtgttatcggtttgttagtcggaatgtttttcgcaaagaatcttaatgattattgggacgttatattggaaggtttaggttcaaaagttgcaatgacagcagtaatgttgtggttagttgtaggaatttatggaaatattttgaaccgtggacagattgtagaaggtttggtttggttaagtgtaaaaattcatgttagtggagcagcatttacagttgcagcatttatctttgcggcagtatttgcaatggcaacaggttctggtttcggaacaatttctacaatgagttttattctttatccagcaggtattttgttaggatcaaatccggcagtattggcaggtgcaattctttcaggagcagcagttggagataatattgctccagtttcagatacagcaattatcgcttcttccagtcaggaatatcagaatagagaaggagttgctgatattggaagtacagtaaaaacaagagcaaaatttgttgttattgcaggtgttatttccattatcttattctttatttttggtggtgcaggtgaagcaacagatgcagaacaggcagaaatgttattagcacagtatcagaatccgaaaggactgttacttttaattccgacaattctggttattgcgttagcaatcaaaggcattaatatttttgcagcattaggaacaggaatcattacagcatccgtaattggtcttgcagcaggcttattcccagcttcagcgttattctcaatgaaagacggtgtgatttcaggagcaattcctgaaggtgttgcaggaatgacaacagtaagtatcgtattgattttggttgttgctatgggaaatatgcttgttaaaagtggctgtatggaagcaatcgttgattggatgaataatacgataatcaagactcctagaggcgcagaagtagctatttgggtattagcaacaatttttggtattttgattgcagcgattaacacaattgcaaatatttgtgtggcaccatttgttaatgcagtaggtaagaagaataatcttcatccatatagacgtacagatattcttgcaacaacaatttgttccttcccattcttccttccattcggaggatgtgtactgttattgttaggtggaatttcttctatgatggatacatacccattccttcctaaattaggtggagctgatatgatgtttacaacattttatagttgggcaatttggattgtaatgcttattgtatgtttgacaggatggggacgagcttttgaaggcgagaatggagaatatatccctgcaaaagaaatgaaaaagaataagtaatagacgtacaaaataagaagcaagtaaataaggaggtttttactatgcatgaattgtcaaagatgatcaaagatgatatgaagccagcattaggcgtaacagaaccgggcgcaatcgcatttgcagtagcaaaggcaagaagtttcactaagggcgatattaagaaagtcaatgttgcaatgaatagtggaatgtataaaaatgcatttacttgtggaatcccaaacagtaatgaagtaggtaatatatttgcagctgcattaggtgtagtagcaggaaatgcagacaagggattggagtctcttgcagatgttacacctgaagataatgtaaaagcgcaggaaatgattgatcagggcaagattacagttgaactgagtggcattacaagtcgtatttttattgaagctacagtggagacagaagaagataaggcaatcgtaacaattcgtgactctcatactaatatcacaaaaattatagtgaacgataaagtcgaactggaaacagaggatgagaaaaagacagaagaagatggcggtgaagaagaatctcattctattcataaatatactttacaacaattatacgattatgtaacaacagtagatattgaagaaattcgttttattaacgaagcatacaaagtaaacctggaattgttccatgaaggtttggaaaatccaagaacaacatttgcaagacagttgttagctattaataatggaaaagaagtttctgacgatgagcagaaaacagcatctttgatgtgtaatgcagcaattgaggcacgagttattggtttggataaacctgctatgagtattacaggttctggagcacatggaattatcgctacaatgccattatatgcagcgtataaagtaaatggatacacagaagaacagttgcttcgtgcaacagccttgagttatcttgtatgtatgtacataaaagagtattcaggacgattatcagcattctgtggctgtgctatcgctgcaggttctggtatggcatgtgcactggtttatttacgcggtggaacagtcgaaatgatggctcatacattgaataacatggcaagtagtattacaggtatgatttgtgatggcggaaaccagggatgtacaatgaagggagttgcagcggtagatgcagcgtataaatcagttgaatttgcaatgaatggtatttatatttcagaagtgcatggaattaatggaaatacaccggaagagactatgcgaaatatgggactgattgcttcacctggaatggttggcacagagaaaacaattgttgagatttttgaagacaagctgaaaaagtaatattttttaatttttaatcccaaaaagaggcggatatcaatggaacaacccagagatattcgcctctttggaaatattacaacatcacattattttttacaataatattatatattgattttggattatagtgttctgaaatcgttgtaagaaatttatgatattgtttcgaagtcattttttatttaattaataagatcatctttcatcatttctaagttagttataaagttccccttttatctatacgatgattcttgtaatcattgtacatacagacattgaatagatatgactctactatacttaacttcaaattacaaagcaagattttaaagaaaatgcaataaagtgttgcatgttccggtaaaaatttggaatgtgcaatactaaaataacagctgtacacatgttttttagcagacttattatatatagcataatcaaagcagaaaatgtaataagtagtatagcagcgtgtcggacagttatattatcaagagataacttccataaatatttctacaagaactggtgaacttccttatctgtagcaatccaagtgttatcataggaactatcagtggtcttcatttcgtggatgtataatttcccattggagattctatattctcttttataagccccacctttgttactattataggtagtgtttactataaatccagtgtttgagtcgagaagtatttgacggttgttttttgttaatctaattaatctaagtttatcaaaagtatacatttttcacctatcaaaaatcatattttttaggattcagtccagaagctataagcagtttctttcgttcttcaggatccataaattctaattcagtaggatccagtccggataattccaattcagtttttgtagtattttgatctttcatattattacgtcacccacgttaatattagatatccattgtaacataattatgatagaggtgtgtataaaaatttgacagagagtgttgtttttgtcagaagaaaaatactaatagggatttttatagtgattataagcacatatatgaagatgttgataaagtgataaagaaacatgttacgtggttagaataatattaatatgaagaactatggtttctttcagaacatatttcgtagagtaaacaacgataagattttttgcagtgtttgaatatatttgtattgacgttcaatttcaatccagttgccatggcatagtgagtttgcctcttctaattcataacatgtaagttcataatctgtccaaagtggacaggaatgattcttgctaaaagcacaatggtttttcataaattcctcctaaaattcatttaaaatctgtcggcgatcatatcacagtctttggattcgatatcgcatattatggaatcgtcataggaatcggaatacttgcgggacttatgatggcggtaatggaagcaaagcgtacgcatcagaacgtagaagattataatgatctggcaatatatggagttatcttttcaattatcggagcaagggcatattatgtgattttctcctgggatatgtataaagacgatattaagaacatcattaacatccgtgagggcggtcttgccatatacggcggtgtgatcacggcaattgttgtagtatttatatttgcaaaaataaaaggattatcaccgttcctgttatttgacacaggcagattcggtctgatcaccggacagatgatcggaagatgggggaacttttttaatcgagaagcattcggcgaatatacaaatggcttatttgtcatgagacttccggtctctcagctgttggcaggcacgattgtagtgatatccgctatactgatcattgcaggaagaaaaaaagcagcagctttacaaaaatagtccggctgccgcaaatataatcgaatacagaaaaaaatcccggtatgtgaaaggacaatgagctggatgctcaaaaatgtctgattcacataccgggattttttattcatattacatatcaatcttactgagtgctgcttcatcagctacaatcgtaacatcattatgtaactgaagaatagaagcaggaactttcggagtaattggtccgtataagacctcttttaagatatccgccttatcttctccgcttacaacaaccagaattttcttggcctgcatgatattcttgattcccattgtataagcctgtctcggaacatcatcttcagattcgaagaaacgcttattggcttcaattgtactttctgtcagatctacgcagtgtgtctctttctcaaaagcggcacctggttcgttgaatccgatatgtccgttgtgtccaagaccgagaagctggaggtctacaccgccctgcttacggatgactgcattataatcgttgcaggctttctcggaatctgcttccagtccgtccggaacgaaagtacgggttttgtcgatgtttacatgatcaaagagattggtattcatgaaatatctgtagctctgatcattttcaggactgagtcctttgtattcatcgaggtttacacttgtaacctgggaaaaatcaagatcccctttcttataccattcgatcagctgtttatatgtaccgaccggtgaagatccggttgcaagtccaagtacacagtttggcttcataataatctgtgcagaaatgatgtttgcggccttacggctcatatcctgatagtcttttgctttataaattaccataataaaatctctccttattctattgtttttttgtttctgaatattagtatatacattataaatgaattttcaagtaaaatagcatgaactgaaactactttcaaaagtggaaagaaattacctggaattgtgcatattgcataaaaaacggattttgaaataggcaaaacagagagaagtattgaaaaggatgaaagaagtttcaagaactgaaaaggtacttgaaaataaaatcgaacaatactatactgattgcagaacgaaggagggaacaaaaaatgaatcagaaagttgaaaatctgaaggggaaattaattgtatcatgtcaggcattaccagatgaaccattacattcttcattcattatgggaagaatggcactggctgcaaagcagggaggtgcaagtggaattcgtgcaaatacaaaagaagatatcaaggagatccagtcacaggttgatctgccgatcatcggaatcgtaaaaagagattatgatgacagtgatatctacattacaccaacgatgaaagaaatcgaagaactgatggaagtaaaacctgaaatcatcgctatggacgctactatttcaaagagacctggcggaaagacattagatgagttctttaaagaagtaaaagcaaaatatccggatcagttattcatggcagattgctctacagtggaagaagcactgcatgcggatgaacttggatttgacttcatcggaactacaatggttggttacacagagcagagcaagggcgataagatcgaggcaaatgatttcgaaatcttaagaaagattgtcgcaaaagcaaaacacagagtgatcgcagaaggtaacatcaatacaccggaaaaagcaaaacatgtgatcgagcttggtgcgtacagtgttgttgtaggatctattatcacaagaccgcagctgatcacaaaatcatttgtagaagaaatggaaagataattctgcaagaaatttattaaattaaatttatataaaaagacaaagaaaaggagaaagaaaccatgagaaatcttgaaaagtacaaaggcgtaatccctgcattctatgcatgctatgacaacgaaggaaatgtaagcccggaaggcgttcaggcactgacaaaatactttgtagaaaaaggtgtgaaaggtgtatatgtgaacggttcgtcaggagaatgtatttatcagagcgtagaagaccgtaagatcatccttgagaacgttatgaaagcagcagaaggaaagcttacagttatcgcacacgttgcatgcaataacacaaaagatagccaggaacttgcaagacatgcagaaagccttggagttgatgcaattgcagcaatcccaccgatctacttccacctgccagagtatgcaatcgctcagtactggaatgacatcagtgcagcagcaccaaacacagacttcgtaatctacaacattccacagcttgcaggagtggctcttacacagggacttttcgcagagatgagaaagaatcctaacgtaattggtgttaagaactcttctatgccggtacaggatatccagatgttcaaacaggcagcaggccctgactacatcatcttcaacggaccagatgagcagttcatgagtggacgtgtcatcggagctgaaggagcaatcggtggtacatacggagttatgccggaattatatctgaaattagacgagtatgtaagagccggaaagatggaagaagcaagagaaatccagtatgcttgtgatgagattatctataagatgtgctctgcacacggaaatatgtacgcagtgatcaaagctatgttaaaaatcaacgaaggtctggaacttggcggagtaagagagccactgccagcattagtagaagaagacatggctatcgttgaagaagccgctaagatggttcgcgacgcaaaagctaaatatctgtaagattatataaaaaatacatgagagaaaaatatctgtaaggagagagacgatgcaagggtttaccgtagtagatttagtcattttagtagtttatctcgcggctgtactgttcgccggccttcatttcgcaaagaaagaaatgaaaggaaaagagtattttaaaggagacggaactgtaccgtggtgggtaacttccgtatcaattttcgcaacactgttaagtccgatttcattcctgtcattagcaggaaactcatacgcaggaacatggatcatgtggttcgcacagcttggtatgctgttagctatcccaatcacgattaaattcttcctgccaatctacagcaaactggatattgatacagcatatcattatctggaactgagattcggaagcaaaggacttcgtgtacttggagctgtaatgttcatcatttaccagatcggacgtatgtcaatcatcatgtaccttccatgtatggtacttggaagtctgactggaatcagtgtaaacttactgatcattatcatgggtatcattgctattatttactcatacacaggaggtcttaaatccgtactttggacagacttcatccagggatctgtacttctgatcggtgttacatttgcactgatcttcctgttagcacacttagatggtggatttggagcaatcgcacatgcactgataacagagcataagttccttgctgtagatcagccaatcttcaatgctaatatttttaaagacagcgtattcatcatgatcgttggtgccggattcaatacaatggcatcttacgtatcaagccaggatattgtacagcgttttacaacaacaactgatacaaagaaactgaacaaaatgatgcttgcaaacggaggattatcaatcttcatcgcaacagtattctacctgatcggtacaggattatacgtattctatcagcagaatacacttccaccggcagcagctcaggaccagatcttcgcatcttacatcgcatttgagcttccggttggtataacaggacttctgttagcagctatttatgcagcagcacagtctacactttctacaggtctgaactctgtagcatcaagctggacactggatatccagacaagactttctaagaaagaattaagctttgagaaacagacaaagatcggacagtatgtatctctgattgttggtatcttcgcaatcgtagttgctatggtactggctaacggcggagtaaaatctgcatacgaatggttcaatggattcatgggactggtacttggtatcctgatcggaacatttatccttggagcatttacaaaggttgccaatacatttggtgcagtatgtgcattcatcgttgcatcaggcgtaatggtatacatcaaatacttcgtacctgctgatcacgtatcaatctggtcatactcaatcatctcaattgtagtatcactggtaattggtatcccggcaagtatcatctggagaaaggcaaaaggagacaattccgtacctgctcctaacacaaccatttacaaaaactaagaaggagtgacgattttcgtgatttttggaaatatcaataatttatcagaattcccattcttagaagaacaggtaaaagagtgctttgaatatgcaaagacacacgaccttgcatcttatgaaaagggaagttatgaaatcgatggtgacagactgtttgtcaatatcgtagaatatacaacaacaacaccggaagaacgtttctgggaagcacataaaaattatctggacgtccatgtaatgatccatggaaatgaacagatcgatctgaacttcattcagaatatggaattaaaagattttgtggaagaagatgattttcttccgatggatggggaaaagaattcttccgtagtcctgacagatggagatttcctgatctgttatccgagtgacggacacagaacagcggttcaggttcaggaaccggaaaccattaaaaaggcaatatttaaagtaaagatttaatcagaaaaagtcgagggcaaaccataaaagaacggtttgcccttttctggctgaacgagtataatgaaggaaaatgaaagaggcaaagcagagatgaaaaaatatattagtattgacatcggcggcacagcaatcaaatatggtattgtgagcgaagatgcagaagtattgttaaagaaagaaatgaagacagaagcgcagaaaggcggaccggcgatccttgataaagtcatcggtatcgtagaagcattaaaagaagaggcagacgcaggtgtgtgtatttctacagctggtatggttgacattgagaaaggtgaaatcttctattcggcaccgctgatcccgaattatatcggaacggcattcaaaaagacggtagaagaacgattcggaatcccatgtgaagtggaaaatgatgtgaattgtgcgggacttgctgagtacaaagcaggagcggcggcaggaagtaaggcggctgtgatgctgacgatcggaaccggaatcggcggctgtattttgctgaatggcgaggtgttccacggattcagtaacagcgcatgtgaagtcggatatatgcatatggatgacagcgatttccagacactcggagcagccagtattctgacgaagaaggttgctgcatggaagggagaaccggcagaaaattggagcggatatcgcatttttgaagaggcaaaaaaaggtgataagatctgtaaccgtgcaattgatgagatgacggatgtacttgggaaaggtattgccaatatctgctatgtagtgaatccggaagttgtcgtacttggcggcggaatcatggcgcaggaagcattcctgaaggacaagattgaaaaagcagtggaaaaatacctggtgtccagcatgtgggagcatacaagtatcgcatttgccaaaaaccagaacaatgccggtatgttaggcgcattctatcattttcagggaagacatgcatagtctggacttataaaataaagaagcaggaatagtaagatatggaatattatgtaaaatcagtcgttccgatcatagaatcgaattatgataaatttacgacagtggaacggaatatcgcagatttttttatacagaacagaaagaaagtggatttttcatcaaaatccatttccgagagactcttcgtatcagaagcgtcgttatccagatttgcgaagaaatgcggatatcgcggatacagagaattcatctatcagtatgaagagacatttgtagaaaagcaggaatccattaccggtaatacgcgaatgatcctgaatgcgtatcaggaacttctgaataagacttacagtctggtggatgaggcgcagattgcaaggatcagcagatatctgaatcaggcggagcgtgtgttcgtgtgcggaaccggaagttccggtctggcagcaagagagatggaactgcgttttatgcgaattggtgtggatattgattcgctggtagaaagagatatgatgcgtatgcaggcggtattccaggacagaagaagcctcgtattcggaatcagtatcagcggatccaaggaagaggtcttgtttcttctgaaagaagcatatcggaaaggtgcgaaaacgattctttttacggcgaacaaccggggtggcttcgagcagttctgcacagaagttattctgattccatcactcagacacctgaatcatgggaatgtaatctcaccgcagttcccgattttggtcatgcttgatattatctattcttactatttggaacaggataaatatgaaaaagaagttctgcatgataatacactgcgtgcactggaagaaggagaagggatgcacaggagtttttagaatgttaagaggtatgttgggaaaaaataagatggaggatatataaaatgataatcaaaaatgtgattgtctatacagaagacaaaaaatttacagcaggcggcattgttgttcacgatgacaagatcgaaagcatttacacgacagaaaacgtaccggatatgctgggggaagaagtcgttgacggacagggggcatacgcaattccgggactgatcgatctgcatttccacgggtgtatgggagatgacttctgtgataacagtaaagaggctattgaaaatattgcaaaatatgaggcttctgtgggtgttacaacaatcgcaccagcaacgatgacacttccggtagaagaactggaagatatcttaagaacagcagcagaatacaaaaaagagcagaatccgaagggagcggatcttgtaggcgtgaacatggaaggcccgttcatcagcccggtgaaaaaaggagcgcaggatgaaagaaatatcatgccttgtgatacggacatttgtcagagattccttgatgcttcggaaggccttgtgaagtttgtaggacttgcgccggaagaaagcgaggacgcagttgcatttgtagaagcaatgaaagataaagtgaacatttcgcttgcacataccaatgcggattatgcacatgcgaaagcagcattcgatgccggagcaaatcatgccgtacatctctttaatgcgatgcctgcattcactcaccgtgaaccgggtgttgtaggagcagtgtccgacagtgcacatgtaatggtagagattatctgtgacggtgtacatatccatccatcgatggtgagagcagcgttcaagatgctgggagcagaccgtatgatcctgatcagcgacagtatgcgtgcgaccggaatgccggacggacagtatacacttggtggattggatgtaaaagtagtcggtaatcatgcaacactggtatctgatggagcacttgcaggatctgttacaaaccttgcagactgtatgcgtacggtagttaagaagatggagatcccgcttgagacggctgtagcatgtgcgacgatcaatccggctaagagtcttggaattgaagatacatatggttcgatcgcaccgggaaagaaagcgaatatcgtattattagacgagaatttggagcttaagatggtaattaaggacggacaggaattataattcatgcaatttatagtataaggccatttggtgttaaggacagatgaaaaagattatatttttaggtgacagtattacagatgccagttattgctttttagaaaatccactgggaaacggttatgtgaatatggtggctgagaagttgaatgacagtgacggcggaaggaagaagtacgacattatgaatcgaggacatgatggattcacgattcatggagtgaaacgtatattggagaaggaatgcattttaaaacgaccggatgtcgtaagcattctgataggatgcaatgacgtcggagttatgatgaatacaggaaagagtctggaagaacagcagtttgaagcctgatatgaagccattgtgaaagaaattacagagcaatcggatgcaaagcttatctgtatgtcgccatttatagtgccatatcccggaatgtatgaaaactggattccgggaataaaacagacagaaagaatcgaaaaaaagattgcagaaaaatatcatgcggactttcttacgcttcaggacacgataatattgaaagcagaaaaagcaggatatgagagtgttacaacggataaaagctatacaaagtgtcaggcaccaatggtaggtagctatcattaagataagaattatgatatactagaagagccgggaaattatgaatttcttgatacagttctcgtattgcgtctctagataaataattcaggcatggcaaacagacagattggggaatctgcctgctgaaaaaatatcaagatatgaatattttatcggtattggaatgtagttgcagtccttgctcttaagtagcggggattgcgcctgtcgggtcttacagcaattaattccctacctattaaagcaataacatcaacgggcggtgaggcacaagagcgtctcagaaattccgtacatatagcgatagctatgctgaaatttatctgataactatacttccgatcctttttttcaacaacaattgcgccagtaatcagttcacaaaagttataaagaatgagttttgcatagatttcttggattactaaatccttttttctactatggaagaaaagaagtcctgcggcatactttatgtcacgaaaagatgtttcgattccccaacgcatattgtacaattcccgtaattcctctgtgctaaaatcttcttttggaagattggtatatacaacttcggtgttcccatttggaaggacaaaactcataatccgaaaagagatgtagtataaacttttacttttagggtcgaggtaatcaaaagttctgtttgcaatagttttatacacttcaggctctgctttaacagtctttgtattttttttggtaagccatctttcgaaaatgatatcatactcaggcgaatctggaagtttaattgtagccaacatactacgcgggttcgattctctagcacgaactagaaaatatgcattgttttcaatggcatgtgcaaacacattgaatgatacaaatcccctatcagcaataaataaaggttttcgcgtaggattagtagccgtataatgatctattatgtcacacattgctatatattcattgatatgattcaatggttggagaattacatcagtatacaaatgtgataataaattgattactcgacacaaaagaatgataataagtaagcgcaaagttgaccacattggtgtcaggtactattaagtttctaaaaaaagtaacgaaaggacggtttcaccgggaggtggaccgtcctttcgttgtattctagttgatgaacaggaaaaatttcaagccccctcctaaccatcgatctcagctttctttttccgcttcatctcagaaaccttcggtattgactgctgtgtaatgtttggaagttttaatcccgttatgctctttaagatccatacaaaagtcagcattacaagaactgggattgcgcaggttgtcacaatcattacagccacgccttctaagatcttgttcaagcccttctcaatagcatcgattttttctgaggcagctgtgccgacggtatcgacagcatcacttaccttgtcttttaagttgttgataaagtcggtgatagaagaaggtgtattattgttttcaatatcatttgttttgttactgttggcagcagaggcagagtcattatctttatccaataatttttcagtatcttctaatgtaaaatccatatcgtaggattttgcataagtttcgttcactttattcgtcatccagacgctggtaggaaccagtccccagagaaggattccaagaatgatacttttgatcccgattctgtaaatgaattccttccatccggctttcataaaattaccggttgccatcagaatacatccgataggaaataagattttaaaggcaatgtatcctgtgatggttagtaaatatttctcaataatgatcacagcataaacgatcaccatatagcctgcaacatcagcaagcttattcgcaataggagttgttgcatctcctggtattgcagctgctccggttgcaagtgctgttgcagtacctgtaagctctaaagcctttttctgcaattcattcaaagtattaataatcctactgtatgtatcagcagaagttgcccattttgagattgcaaaaaaagagattaatgcaattgcaatgcatataagactataaattaaatgcttttgcatggattttttgtcatttttaatcgcgacatctgtacagtttgtatttctgtcattattcatgtcttttgtttcctttcataaaatttagctgtttttaaatacgcaataaattaacgtagattcagattttttaatccaaataaagtatatcatctcgaaaaaggtaattcaattagaacaaaaataaacagaatcaaaagtagttgacatttcgtattacgaaagtataatagtataggtgagagaaaggagaaggcctatggctaagatgggacgtccgaagtcagacgtgatcaaagataaaattgtgacaatccgaatgtctgcggaggaacatcagaaacttagggactattctgagaagcatcaacagacgataacggaaacccttaaagaaggagttgacttattatataagactcgtgattaaggtatatttttagttgaagaacattacgaaatcaagagattatagtaatgaaaagatagaacgaaaaggagaagtgctatggcattaaagaaaaaaccggtaacaggaatgaaagatattcttcctgcagagatggagatcagagattatgtgatcggtctgatcaaagagacatatagaagctttggattctcatccattgagactccatgtgtagagcatatcgagaacctgtgcagtaagcaggggggagataatgagaagctgatcttcaagatcttaaagcgtggagagaagctgagacttgcagaggcgaaggaagaagctgatcttgtagacggaggacttcgttatgacctgacacttccgctgtccagatattatgcaaatcattctaatgagcttcctgcaccgtttaaagcactccagatgggaagtgtatggcgtgcggatcgtccgcagagaggtcgttaccgccagtttatgcagtgtgatattgacattcttggcgagccatccaaccttgctgagatcgagctgatccttgctactacatccctgcttggaaaactggatttcaataactttacaatccgtatcaatgaccgccgtttcctgaaggcaatggcagcttacagtggatttgaagagaaagattatgacagcgtatttatcacactggataagatggacaagatcggtcttgatggtgttgcagcagagatgaaggaaaatggatatgcagaggaatctgttgagaaatatcttcagctgttcaaggagattacaggagatgtagaaggtgttcgtgcatgcaaggaaaaacttcagggattccttccagaagatgcagcagattctcttgaaatgatcattacaagtgtagagagtgcgaaggaagcagatttccgtatgctgtttgatccgacactggtacgtggaatgtcttattatacaggaactatttttgagatttctatggatgagttcggcggatctgtaggtggcggcggacgctacgacaagatgatcggtaagtttacaggacaggatacaccggcagttggattctctatcggatttgaacgtattgtcatgcttctgatggagcgtggatacaaagttccgacaagcaaagagaagaaggcattcttgatcgagaagaacatgccgaaggaaggcatgctcaaagttcttgatcttgcgaagaaggagcgtgcagcaggccgtcaggtaatgatcatgaacatgaagaagaacaagaagttccagaaggagcagcttgcagaacagggatacacagatattacagagtgctacagagattctgttgataacatataggaaaaaaggaaaggaagtaaataaccatggctgaatcaatgcaggggcttaagagaacacaccgttgtggtgaactttcagtagccaatgttggggaaactgtaactatcatgggatgggtacagaagaatagaaataaaggaggacttgtatttacagacgtaagagaccgttctggaattatacaggttgtatgtgaagaaggaactacagatgcagcaatcattgagaaagcagcatctttacgtgcagagtatgtagttgctgttgtcggaaaagttgagagacgttccggtgcagtgaatgataagatcgcaacaggtgagatcgaggtgatcccaagtgaacttcgtgtactttctgagtcacagacacctccgttcccgattgaagaaaactcaaagacaaaggaagacatccgtctgaaatatcgttaccttgaccttagaagaccagatctgcagagaaatcttcgtatgaagagtcaggttatgacactgacacgtcagttcttctcagatgaaggattccttgaagtagagactccgatgcttggaaagacaactccggaaggcgcgagagattatcttgtaccaagccgtattcatccgggatctttctacggacttccacagtctccgcagctttataaacagcttctgatgtgttcaggcgtagaccgttacatccagattgcaagatgtttccgtgatgaggatcttcgtgcggacagacagccggaatttacacagatcgatatggaactttctttcgttgacgtagatgatgttatcgaagtaaatgaaaagtatcttaagaaactttttaaagaagttcttgatgtagacgtacagcttccaatccagagaatgacatggcaggaagcaatgaaccgttatggttctgacaagccggatcttcgtttcggaatggaactgaaagatgtatctgatgtagtgaaagactgcggatttgcagtatttacaggcgcacttgagaatggcggaagcgttcgtggtatcaatgccaaaggacagggcagcatgccgagaaagaagatcgacaagctgacagcatttgttaaggattacggtgctaagggtctggcttatgttgcactccaggaagatggaacagtgaagtcttcatttgcaaaattcatgacagacgagcagatggatgcacttgtaaaggcaatggatggagagccgggagatctgcttctctttgcagctgacaagaataaagtagtatgggattctcttggagcactccgtgttgaacttgcaaaacagcttgaacttctcgataagaatgagtatcgttttgtatggatcacagagttcccgttgcttgagtggagcgaggagcagaatcgtttcgttgcgatgcaccacccatttacaatgccgatggaagaagatatccagtatatcgagtctgatccgggaagagttcgtgcgaaagcatacgatatcgttctgaacggaaatgagattggtggcggtagtgtcagaatcttccaggatgatatccaggaaatgatgttcaaggcacttggctttacaaaagagcaggcttacagccagttcggattccttctggatgcatttaaatacggagttccgccgcacgcaggacttgcttacggtcttgaccgtcttgttatgcttatggcaaaacaggacagcatccgtgacgtgatcgcattcccgaagatcaaagatgcatcctgtctgatgacagaggctccgacaccggcttctgagaagcagctggaagagcttagccttgctgtgaaggcacaggaagaaacagttgaagaataaatagtgatatttcagcaggaaaacagtaaacagagttttcctgctgtttttctacacgttctcgcagtgatttttctgacaatatcaaaagaaatttaaaatataataaaatttctcttgacaaatagaaagtgaacgactacaataagacacatcaaaagcaaaaaccgatgagaaagagaagtaggttttagaagagatcacagagagcagcagatggtgggattgctgtatggattctgattctgaatggactttcgagggcggcctgaaatgaaaagagtaggaaccgccgggaaccgaacccgttatcaatcaggagcgtatgttagtacgtgagaaagtggacgaacgtcaatttgagtggtaccgcgataataatgaattttattaccgtctcaagcaataagcttgaggcggttttttgtatatcaggaaagttgatttataaaaagaaatccacagtttattgacaagaatcccaaatcggctcctttgcttttgcagaaatattaaaaagaaaaaaggagacaacaattatgaaaaagagagtattagcagttattttaggagcagtaatgacaatgagccttgcagcatgtggatcatccgatgcagggaagacttcttctgatgatggagagaagagttacacaatcggtatttcccagttcgcagagcatggttctcttgataattgccgtgagggatttttagaaggactgaaagaagaaggaatcgaggaaggtaagaacctgacagtagaagtgaagaatgcggcagcagatcagggaacagcaaaacagatcagtgatggatttgtttcagacaaagtggatcttgtatgtgcaatcgcaacaccgagtgcgcaggctgcttataattcagcaatgaattccgacattccggttgtatacacagcagttacagacccggttgcagcaaagcttgcgaaagaggatggaacacctgcaggaaatgtaacaggaacaagtgatgaacttccgatcaaagcacagcttgagatgatccgtgagatgcttccggatgcaaagaatatcggaatcctttacacaacaagcgaagcaaactctgtatccgctcttgcaaaatataaagagcttgccggagactatggattcacgatcgttgacaaaggaatcgcacagacagccgatatctctcttgcaacagatgaacttctgacagaggttgactgcctgacaaaccttacagacaacacagtagttgcttcccttgcaacaatccttgataaagcaaacaaacagaacattccggtattcggaagtgagatcgagcaggtgaaaatcggatgtctggcagccgaaggacttgactatgtagcacttggaaaacagacaggtaagatggcagcagagattctgaaaggtgagaagaaagcacctgagatgaactttgagacaatcacagaaccaggtttctatgtaaatgaaaaagttgctgaaaaccttggggttacagttccgcaggatcttgcagatgaagcggtagagagctttacagagattacaaaatagtattgaaacagagaggttaacacattatggggatttatattacgattttagaacagggactgatctacggaatcctggcgcttggggtatacatcacttataagatcctggatttcccggatctgacagtagatggaagctttccgctgggagccgcactgacagcgacgatgatcacaagaggcgttcatccaatcctgacactgccgacatcattcctgatcggtgtgcttgccggagtctgcacaggtctgattcatgtaaaattcaaggtaagagatctcttatccggaattatcatgatgacagcactgtggacgatcaacttaagactggcaggaacagcaaatgtcccaatctttggagatgacagtatctttgataatgcatccgtaaacggaatctttcatgatggcctttcaaattacaaagtacttgtgatcgtgcttgtgatcgcagtgatcagtaaagtattattagacctttatatgaagacaaaatcaggttttctgctccgcgcagtaggagataatgacgtattggtcacatctcttgcaaaagatcagggcaatgtgaaaatcttaggacttgcgattgcaaacggacttgttgctctttcgggaagtatcttctgtcaggagcagcgcgtatttgaaatttcaagtggaaccggtgcaatcgtaatcggtttggcaagtgttattatcggaacaagcttatttaaaaatgtatcctttatgaaagcaacaacagcagtgctgatcggatctgtgatctataaagcctgtgtcgcagcagcgttgaagttctttgaaccacaggacatgaaactgatcacagcggtattattccttgtgatcctggtgatcggtggagaacgcagaaagaaggtgaagaagaatgctcgagcttagaaatattgaaaaatattacaatccggggactatcaatgagatgtgcctgtttgacaaattcaatctgaccgtagacaaaggagaattcgtctctgtagtcggaagtaatggttcgggtaagacttctatgctgaacatcctctgtggaagtattccggtagacggtggacagatcctgatgaacggtgaagatattacaacaaagaaagaattcaagagaaatcagaagattggacgtgtttatcagaatccggcaatgggaacatgtccgacaatgacgattcttgaaaatatgtctcttgcagacaataaaggaaaattctttggcctcagttccggaatcaataaggcgcgtaaagaatattatcgtgagattttaagccagcttggacttggacttgagaataaaatggatgtgaaagtaggatctctttccggcggacagcgtcaggcaatcgcccttctgatgtctacgatgacgccgattgatttcctgatccttgatgagcatacagcggctctggatccgaaaacagcagagctgattatggaattgacaggaaagatcgtagaagagaaaaagcttacaacgatcatggttacacataatcttcgctacgcggtggaatacggaaatcgcctgctgatgatgcatcagggtggagttgtgatggatctcaaaggaaaagaaaaagaagaacttcaggtagaagatatcttgagcaagttcaatgagatcagtatagagtgtggaaattaaatacttaaaaatacaaagaaaggattgatagctgtcacttagacaactgtcaatccttttttaaagctttttattcgtcccatccttcgtagaatcggatatttacggaaatatttcttacaatctcatcttcagcaagttcaatatcttccagatcagatacatgtgggaagattggatcctcttcttctaattcaacagtgatccatgttcttgcagcttcatttgcattgtcgatcgcgtcgtccaaagtttctccgtatgcctcgcagcattcgagatccgggaaatgtgcgtcatagcctccatcttccttcttacggaatacggctggatatataaatttcatttcataattcctcctggtttctaaaacataatctgttacttagtatagttgataaaaaataaaatggcaagaggggaacgttttagatatgaaaaaagcacttaaatctttaaagatctaagtgcttcagagcgacagacggggttcgaacccgcgaccccaaccttggcaaggttgtactctaccaactgagccactgtcgcataggattgttcccaatgaacaatcaatatgaaattaagatgttgagagcgacagacggggttcgaacccgcgaccccaaccttggcaaggttgtactctaccaactgagccactgtcgcataacttattgttccgacgaacaatgaatatgttactacaagatcgttaaaatgtcaacagaaaaaataaaaaaaattagaggaaatgaaaaaaattaagtctaagacttcctagtgaaagaaaatcatgctatactgtggttactgtggctaaacacaacagatgtgaaaagaaggatgttgtaaatctttgttctataataaaagaacaaattacacagaaataaaagatgaaagaggtgtccataatgaaaacagtaaaggtagcaattctcggacttggaacagtaggatccggtgtctataaactgattcagaagcgtgcagatgtgatggagaagacaatcggcgctcagatggaagtgaagaagatccttgttcgtaatatgaataagaagcgagagggcgtagacgcttctcttttaacagataattggaacgatattattgaagatgaggagattcagatcgtaattgaagttatgggcggtatagagccggcgaagacgatgattcttgaggcgctcagagccggtaagaacgtagtttctgcgaataaggacctgatcgcagaggagggacatgtacttcttgcaacagctgaagagaatcatgtggatttcctgtttgaggcagcagttgccggagcaattccgatcattcgtccgatgaagcagtgcctggcagtaaatgacatctctgaagttgtcggtatcgtgaatggtactacaaactacatcttgacaaagatgacagaagaaggaatggatttctcagacgcacttgagaaagcacaggagcttggatttgctgaggctgacccgacatcggatgtagaaggtcttgatgcaggacgtaaggtggcgatcatggcttctatcgcgttccattccagagtcgtatttcctaacgtatttacagaaggaatcacaaagatcacagcgaaagatatcgagtatgcgaaagaatttgacagtgtgatcaagctgcttggcgtagcacataacacagagagtggaattgaagtaggtgtttacccaatgatgatccataaggaacacccgcttgcatctgtaagagattcctttaatgcagtttttgttcatggagatgcagcagatgatgcaatgttctatggacgcggtgcaggagagttcccaacagccagtgcagttatgggagatgtgatcgatgttgcgagaaatatggcatatggctgcaatggaagaatcagctgtacatgttataagaaccttccggtaaaagacattggggatgtgaagaataagttctttatccgtatgcaggtaacgaatgaaccaggtgttcttgctgcagttgcagaagtatttggtaatcataaggttagtatcacaagagttgttcaggaacatacacagccacatcaggcggagcttgttattgtaactgagagtgtgaaagagaaatacatgaagcaggcgttagaggagcttctggcactgcctagcattctggaagtgagcagcattatccgcgagtattaatcagaagaagtagaaatcagacagaagcttacaggtttatcagatgtgatgtttctatatgaaagaagaatcattgttcaagaaggagaaaaatagttgagttacgcagataaagtatttattgatatgtgcagagacattatagagaatggaacaagcacagagggtgagaaggtacgcccaagatgggaggacggaacaccggcatataccattaagaaatttggagtggtcaaccgctatgacttgtctaaggaatttccggcactgactcttagaagaaccgggatcaagagctgtgtggatgagatgctctggatctggcagaagaagtcgaataatattaatgatctgaacagtcatatctgggacagttgggctgatgaggatggttcgatcggaaaagcttatggttatcagatgcaggtgaagcatcagtataaagaaggcatgatggatcaggtagaccgcgtgatttatgatttgaagaataatccgtatagccgtcgtattatgacaaatatttacgtgcatcaggatcttcatgagatgaatctgtatccatgtgcatatagtatgacatttaatgtgacaaaggaaaaagacagtgacaagcttacactaaatggaattcttaaccagcgttctcaggatgtccttgcggcaaataactggaatgtgtgtcagtatgcagtattgcttcatatgttggcgcaggtatgtgacatgaaggtcggagagtttgttcatgtgatcgcagatgcacatatttatgaccgacatgttccgatgattgaggaactgatctcaagagaaccgcttccagcaccgaagttctggctgaacccggaagtgaaagatttctatgacttcacaccggatgatgtgaaactggaaggatatgagacacatccgcagattaagaatataccaatcgctgtgtaaaggagaagaagtatgcaggcaatcgtagcagcagataataattggggaatcggttaccagaacagactgctggtgagcattccatcagatatgaagttctttcgtcagaaaacaacaggaaatgttgtagttatgggacgaaagacactggaaagtttcccaaacggacttcctttgaagaatagagtgaatattgttcttacgaagaataaaaattatcaggtgaaagatgcagtgatcgttcactcagaggaagaacttttagaagaattgaagaagtatccgagtgagaaggtttatgtgatcggtggcgagagcatttacaagatgatgcttccatattgtgatactgtatatgtaacaaagatagaccgtgaattccaggcagacacttatttcccgaatctggatcagatggaagattggaagatgacggaagaaggagaagaacagacttgttttgatctggaatttgcttttacaaaatatgagcgctgctaaaacagatgctgtgaaagtgtaaaagcgtaaaagtgagaagatgaatttgaagatgaagaagagaagagtaagagactttctggttgcaggaagtcttattcttggaatgatgctgaccgggtgtggaatgtccgggcagcagacagagcaaaacgggggaaaagaacagaataaagtagaaaatgaaaagattagtgttgtagcgacaatctttccgcagtatgattttgtgcgtcagatcgcgggagaaaatgtggaacttaagatgcttttaaaaccgggtgaggagacacattcttatgagccgacgccacaggatattattgcgatccagaatagtgatctgtttatctatgtgggcggcgagaatgatgcctgggtagaagacattcttgaatcaatgccggacaacggaagaaagactctgaagctggtggattgtgttgacacagtggaagaggaacatgtggaaggaatgaaagaagagcgtggtcatgatcatgacgaggatgatgcggagcatgaagagcacgaagtggagcatgaagaggatgaagcagatcatgaagagcatggacaggaagaaacacattctgtacatgaaattgatgaacatgtgtggacatctccgttaaatgcggtgaagatcgtcgagcagatcaaagaagaactctgcgagattgattcggaaaatgcatctgattatgaagaaaatgcagaagcttatgtagcacaattgaaagaattggatcaggaatttcaggatgtggtggatcattcaaaacgaaagctgatgattttcggagacagatttccgttccgttattttgcagaagcgtatggtctggattattatgcagcattttcaggatgtgcttcggacacagagccaagcgcagctacaatggcgtttttaatcaataaagtacaggatgagaatattaaaacagtattaaaaatggaacttagcaacgaaaatattgcaaaagctattgcagaagcaacaaatgctgatgtaaaagaattttatagctgtcataatctgacagcagagcagtttgcagatggagagacatatctgagtcttatggagaaaaatgttgaaacattaagggaggtgttgaactgatggcgttgattaaatgtgaaaatgtatccattggatatgaaggacagatggtcgtacatgacttgaattttgagattaatcagggagactacctctgtattgtcggagaaaatggttccggaaaaagtacacttgtaaagagtcttttgggactgaagaatgtggacaaaggcaagattgtttttgatgatggattaaaacagacagagatcggatatcttccacagcagacagatgtgaagaaagattttccggccagtgtttatgaagtggttctttctggccggttgaacagcagagggatgaaaccgttttatacagcagaagataagaagcaggcgtgggagaagatggacatgcttggaatccgtgatctcgcaaaacaatgtttccgagatctgtccggtggacaaagacagcgtgttctgcttgcaagagcattgtgtgcgacaaagaaactcttgcttcttgatgaaccggtcacaggattggatccaattgtgacagcagaattttatcaattgatcagccgaatcaataaggaatccgggatcgcagttgttatggtttcacatgatatcgagagtgctgtagaatatgcaagtcatatccttcatttacaggaaacagtgctgtactttggaaaagcagatggatacgagaagagtcgtgccggcaagacattcttaggaggtgagacacatgtttgatacagtgattgagatgttgtcttatccttttatgacaagagcgttcctggttggatcactggttgcattatgttctgcattactgggcgtcagccttgtattgaaacggtattccatgattggggatggactttctcatgtgggatttggcgccatggcgattgcggctgcgatgaatgccgctccgcttacagtagcaatcccggttgttattgtagcagcgattctgcttcttcgaatcagcgggaatgcaaagatcaaaggagatgcggcaattgcactgatttctacaacgtcactagcagttggcgtgatggtgatctcattgacaacaggaatgaatacggatgtatataattatatgtttggaagcattcttgcgatgagtgcggaggatgtgaaattaagtcttgtactttccgtttttgtactcatcctgtttattgttttttatcacaagatatttgcgattacatttgatgagacatttgcccgtgcaacaggtgtaaaagcaggagtttacaatacgttgatcgctgtacttacagcagtgacgatcgtgcttggaatgcgtatgatgggagcattattgatctcgagcctgatcattttcccggcattgacatcaatgagagtgtgcaggacatttaaaagtgtcataataaacgcagcagtgatctctgtggtgtgtctgattgcaggagtaactctttcatatgttgcggcaaccccggcgggagccagtgttgttcttgccaatcttgtaatgatggttctgtatacagtagtcggagctgtgaaaaatcatatgcgatagattaaataagatcaagaactcgacgttgacaagatattttttaacacttataattaatttacgctttacgcaaatacgaagacagggagtagtacacagcttgtggatgtacagaggcttatctctgaattcaggtgatgacatggatagatctggctgttgacacaggcactgtgaacggtaaatactggatattcgccctgggcatgaaggtcatgcttggggctttcttttttgaaaagggaggtatatagattgaaacagatttcaggaaacaaattacttgtaagagcgctgaaggaagaaggcgtggataccattttcggctatccgggagcatgtacgattgatatcagtgatgaattgtacaagcaggatgatattcggatcattctgccaagacatgagcaggcactggttcatgaggcggatgcttatgccagaacaacgggtaaggtaggtgtctgtcttgttacaagcggaccgggagctacaaaccttgttacagggcttgcaacagcgaattatgacagtgtacctctcgtatgttttacaggtcaggtagcaagaccattgatcggaaatgatgcattccaggaggttgatattgtaggaattacacgcagtattacgaaatacggtgttattgtacgaaacagagaggatcttggaagaatcattaaagaagccttttatatcgcgagaacaggaagaccgggaccagtactgattgatcttccaaaagatgtgatggcagaacttggaagtgcggattatccggatacagtcaatatccgtggttataagccaaatacgaatgtgcatatgggacagttaaaacgtgcgcttaagatgctgaaaaaggcaaagaagccgttattccttgccggaggcggtgtgaatattgcacgtgcgaatgaggtgtttacagaagttgtagagaagacagaagtcccggttgttacaacgatcatgggacgcggtgcggttccgacagatcacccgctttatataggaaaccttggaatgcacggagcatatgcttcgaacatggcagtcagcgaatgcgatcttttattctcgatcggaacacgttttaatgaccgtattacaggtaagctgcatgaatttgcaccgaatgcacagatcgttcatattgatatcgatacagcatctatttcaagaaatattcatgttgatgtgccgatcgttgcagatgcgcttgaggcagttacgaagatgaatgaatatgtagagcactgtgagacaaagaagtggagaaaacagatcgcagagtggaaggaagaacatcctttgacaatgaagaaccgcgtggatatgggacctcaggatattattgaagagatcaaccgtcagtttgacaatgcaatcattgcaacagatgtaggccagcatcagatgttcacaacacagtatattgagattacaaagaacaagcagctgatcacttccggcggacttggaacgatgggatatggtttcccggctgcgatcggagcgaagcttggtaatccggataaggacgttattgcaatctccggagatggtggtatgcagatgaacattcaggaatttgctacagcagtattggaagaacttccattgattctctgtgtatttaacaatgaatatcttggtatggtacgtcagtggcagaagctgttctatggaaaacgttacagtatgacgaacctgaaatcaggagcacttttccgcagaacaaacgggcaggagatgccggagtacacaccggattttgtgaagcttgcagagagctacggagctaaaggaatccgtgtcatgaagaaagaagatatcgcagctgcatttgaagaggcgaagaagaatacaaagacaccgacactgatcgagttcgttatcaatccggaagaacttgtatatccgatggttcagccgggcggaacacttgaagatttgatcatggattgttaatcgattagaacagaaaatataggttagcgaggaagagatatggataataatatgaaaaagagatggatttctctctatgtagaaaaccaggttggtgtactttcgaagatttccggtttattttccgggaaatgttataacctggacagtctgacagttggaacaacagaagacccgaccgtttccagaatgacaattgcaacagtcagcgatgatgagacatttgagcagatcaagaagcagcttaaccgtatgattgaagtaattaaagtaattgattttacagacgtatttgtaagaatgaaagagattctttatgtaaaagtcttaaaatgtacaccggaggataaggttgagatctttcagatcgcagagacatttaaggcgaaagtaatcgattacggaaaagacagtcttctggttgagtttgtacagactgcgacaaagaatgatgcagttgtgaagttgatgaaggaagaatttaagagcattgaagttgtccgaggcggaagtgttggaattgagtcgatcagtatgatggaaagataattaataaaaagaaataaaaaagtatcagaagcaaatttaaaagtttctgatacttttttatttatatgtttttggattttgtatccatttgtgatttgctattacaaacggaataatactgtcgcaatattaaagtaaatcaggattgagaaggtatccaccagtgttgtgatcagtggagatgccatgatcgcagggtcgagatttactttcttggcaagaagtgggagggtacatccaaccagctttgccatgatcacggttcccatcagagagcaggcaatcacaactgcaagtcctggattgtgatactgtataaagatacgtacaccgttggcaacagcaagaaaagcaccgacgatcaaagagatacggaattctttgaacatgactttgaaaagatctgtaaaacggatctcatccagtgcgattccacggatgatcagtgttgcactctgggaaccacagtttccaccagtatccatcagcattgggatgaaggatacgagaagagggatggctgcgaatgcattttcgtatcttgtaatgatcgttcctgtgatgatggaagtgaacatcaagatcaaaagccatgggatacggttctttgcatgctgaagaacggatgtttcaaaatatgtcttctcactagggttgatggcagccatctttgtgatatcctctgtggcctcatctaccataacatccatagcatcgtcgaatgtaacaataccaaccatgcggccgtcctggtcaataacagggagcgcaagcaggtcatactttgtgaacagctgtgcaacctgttcctgatcagagtgtgtatacacggagatgatctctgtctccatcaggtctttgatcggaacatcgtcatctgttgtcatcaaatcttttgcacttacgataccgaccagttttctgcgttctgtgatatagcaggtgtaaatggtctctttatggattccggtcttcttgatatgtgccatcgcctgtccgacagtcatttcctcacgcaggtctacatattccgttgtcatgatacttccggcactgtcttccggatagttcagcagctggttgatcatgctacggtctgacgcgctgacggtagccagaattcgctttacaaggtttgccgggagttcttccagcatatcgaccgtatcgtccatatagaggtcgtctaagagctctttcagctctttctcagtaaacattgttaccagataagtctgcatggaagtgtccatattggaaaatacttcagcagctttatcttttggaataagacgaaaagcaagagccagttctttatcacttaaagttgagagaagagaggctatgtccacttcgttcattacatcgagaatacttctgacagctttgaattcgcgctgcgccagaagctttataaaaatatctttgtccatgataattacctcgcattattttatttttgtctattgagccacatatgtggtaactactggcaccagagtccataacctcacctcccttgttcgtatttttatgagaaacaaaaaactccatcattgcctgaacaatgacggagtcgtattgacttcttataaaatgcatcgttcaagctttagtatcacagggcatatcaattgcattaggttgtgccttctcgacacagcctgctgaccaactaatcgtgtctccacaatctcgcggcagcaatctccgggtcctatcgaatgcttaagcatgtcaaatatcccaatccctgtggtaacctcacctaccgaaatgatgtagttgtgttgtttttaccatagattattgtatcccacgcagcggggcgtgtcaaggaaaaatgcgataaatctgtgtaaattggtgtaaaaagaaagaaaaaagtggaaaaagatgaaaagacaaaaaggatatctgtcagagtaatcattacttctggcagatatcctttttgttttcaatccttgcggatctgatatacaattttcccattcactttttcctcagtgatcattttttgctttaccatatagggaagaattgaatcaagaaattgtcttggattagtcacattgatttgttcctgcataaatggctgtttcgccgtcagatctttcacatatggctcaagagctgtgcgggtcataggaccatttttcttcaatgtctttttgactttggagattcctttggaactgagcatattagcaagatcgcttccctgtctcatcgtacgccacaatccccatccgtagacaatcattgtagcaaccgcaaagagcagtacataaggaagatatttcagaatcgtatgcatcatttccgtttctctcctttccagtagatcaggtgattatcatgaaggatctcaaggtatttgatcagtcttgtcagcggctgttccatagaaggaaactctgcttcaagctctttggagattgcatgtacatcctttttatcatcgatggagttccacacaaaagttccaagcttgtctaacttgatttcacttacacggggacgatggaagaagcgctgagccaacttgtgataaaatcccttccattcgataaggacggtaataataccgtcctcacctgtttcatattcaatttccggattcttctccgggataaagtcaagatagtttttactctctttctttttcattgaattatttttccttatcagctttcatacatacaacgtacagaagtacgagtaatgcaatgtaaagcaccagactgccaacctgtggtaagtggaatggcagaatgatcttagaatcaatcttaactactgcaaatacagcaagaaggataccgatgataccttctccggcgatcataccggatgtaaagagaagacctctgtctgtacgtgcttttttctctgcctctgtaccttttttcttctcaacgaagatacgtacaacaccaccagccatgataccagcactcagagagaatggaaggtacataccaactgcgaatggcataaccggcatcttgaggatctcaacaacgattgcaataaatacaccgatcaggatcatagcccatggaagttcctcattcatgataccttcaacgagcatcttcatcattgtagcctgagctgccggaatcttttctgttccgtatccccaagcctcattcagaaggtaaagaacgaatccgattgctgctgaagaagcaacaacaccgatgatctcaccaacctgctgtttggaaggtgtagcacctacgatgaatcctgtctttaagtcctgagaagcatctcctgcgattgctgcaacgatacagatgataccaccgatagagatggctccaaccatacctgtaagtcctgtagtacctgttactttcaggattactgtagcaaagagaagagtagcgattgtcatacctgataccgggttgttagaagatccgatcagtccaaccatacgagaagatacagttgcaaagaagaatccgaatacaacgatgatcagggcaccaaccaggttaaccgggaagatcggaaggatccagatcagaacagcgatcacaatgataactccgatcagtaatgggaatggaagatcctgctctgtacgaagctgattgctggatccggcattctttttcatacttccaatggcctgcttaaatgttcttacgatcagaggaaggctcttaatcagactgatgataccaccagttgcaacagctccggctccgatgtatttgatgtagttagaccaaagagcagaaggaccatccacaagtaattcatttacagtaactgaagcagggaagattgtagcatctccaccgaacagtgcgatcattggcatcagtacgaaccagctgagtgtaccaccggcgaacatgtagctggagatcttcggtccacagatatatcctacaccaccaagtgccggaagaacctgcataccaatctgtgctccgctgtagttcttgaatgcatgtccaatctcacttgggaagagctgcattccgtctgcaaggaatttgtaaacggctgcgataccaagtcctgcgaatactgtaccagccttagatccaccttcttctccagccagaagaacttctgcacaagcagttccttccgggaaaggaagtgttccgtgctcttcaacgataagagcctgacgaagcggtaccatgaagcatactccgagtattccaccaaacagggcaatcagagcgatggaaaggatgcttgggaaagcaatctttccttcttcagcccaaaggaataatgcaggaagtgtgaagatagctcctgctgcaacagactctccggcagaaccgattgtctgtaccatgttgttctcgagaatagaatccttacggagaatcacacgaatgattcccatagaaattacggctgccgggatggaagcggaaactgtcataccaacgagaagtccgaggtatgcgttagcagctccaaatacgattgccagaaggataccgatcaagagtgctgtcaccgtaaactcaggaacgactttgtccgctggaatatacggcttgaattctttcttgttgttgtccattttttcaatgtcctttcttttgttttttatgctatcctgctgtccccacaacagatagcggcgccttttgttaatataaaaaattttttattaacacagctttatgattatagcatattaaagtgctaaaaggaagaataaaacgcaaaaatgttatggaaatatgttgtaaatgtaaaatttttataaaaaatggtagattttggaataaaaaagaggaaaaaatgagaaaaaatttcaaaattcttgacaaaaataggagtttctagaaaaagagacaggaaattgagaaatacaatagaatgtagaaatgtttgatgtcaaaaaagagaatttgtggtaaaatagaatggattatgtagaaacagaaaagaacggaggtcaacagttggaagcttatacagggtttgcggcggtctacgacattttcatggataatgtaccttacgaagagtggggcgaatacattcacagtcttttaaaagaccgtggaatagaagacgggattcttttggatctgggctgtggcacaggaacaatgacggagaagctggcggattatggatatgacatgatcggtgtggataattcagaagatatgctggaacttgcgatggagaagcgtatggagtcaggaaaggatattctttatctgctccaggacatgcgtgagttcgaattatatggaacagtaagggcgattgtcagtgtctgtgattcggtcaactatattacagaaccggaggaactggaagaagtattccgtctggtgaataactacctggatcctaagggcgtctttttgtttgattttaataccgtatataagtataaagaagtcatgggagatacggtgatcgcagaagacagaggtgaatgtagttttatctgggataatttctattatgaagaagaacggatcaatgagtatgatctgactctattcattcaggaagatgcaagtgaagatttgtatcgaagatatcaggagacacattaccagagaggctataccttagaagagatgaaagaactggtagaacgttcggggcttgtttttgaggcggcatatgacgcagttacacacgaggaaccgacagagaagagcgagagaatctatatcgttgccagagaatccgggaaatgaattggatacaattcttgaatagataagaaagacgaggagaataagatatgaatgattatattgtaagagcaacagcaggaaatgcacagatccgtgcatttgcggcagtgacaacaaacctggttgaggaggcaagagagcatcacggaacaagtccggttgcgacagcagcgctgggaagactccttacaggtggagtgatgatgggaagcatgatgaagaatgatacagacatgctgacaatccagattcagtgttccggtcagatcgaaggtctgactgtgacagcggacagcaagggaaatgtaaaaggatatgcatttaatccggatgtgatgcttccggcgaagaacggaaagcttgatgtcggtggagcacttggacagggtgtcatgacgatcatcaaagatatgggactcaaggagccatattcaggccagacaattctgcagacaggagagatcgcagaggatcttacttattattttgcaacatctgaacaggtaccatcttctgtcggacttagagttctgatgaacaaagataatacagtgaaatgcgccggtggatttatcgttcaggtaatgccttttatcgaggatgaagtgcttaataagctggaggcaaacattcagaagatccagtctgtaacatccatgctggataacggacatacaccggagcagatgcttgagcaggttcttgaaggacttgatctggaaattacagatacaatgccggcacagttctattgcaactgctctaagaagagaatcgagaaagcaatcatcagtatcggaaagaaagagattcaggaaatgatcgatgaaggcaaagagattgaagtgaagtgtcatttctgtaatacagcatataagtatacagtagatgaattgaaagaattgttaaaacaggctcgataagtattgccggggcttttgccctgacaccatataaatatagaagatggggtgaagatgagatgaaaaatggatttgtgaaggttgcggcagcgacaccggatatccgcgttgcggatgtggaattcaatacacagaatatcatcaatgctatggaagaagcacagaaaaatggcgcgaagattcttgtgtttccggagctttgtgtgacaggatacacctgtagtgatctgttcgaccacagcgtacttctgaaagcttccagaaaagcattgcttgagattgcagaaaatacaaacgacaaagatatgcttgtatttgtcggagcaccgcttgaagtgaatggaaagctttacaatgtagctgcggcaatgaaccagggcgagatcatcggatttacgacaaagacgttcctgccaaactatggtgaattttatgagatgcgccagtttactccgggaccacagacagtgagagagattacatttgaaggaaagaagattccattcggtccgcagattctcttccaggcagaaggaatggaagaactggtagtggcagccgagatctgcgaggatgtctggtcaccggttccgccgagtattcaggcggcacttgaaggtgcaacagtgatcgtcaactgttccgcaagtgatgagacgatcggaaaagacacttaccgtcgtgcactgatctccggacagtctgcaagattgatctctggatacatttatgcaaatgccggagaaggggagtcaactacggatcttgtttttggcggacacaatatcattgctgaaaatgggacaatcctgaaagaaagcagtagatatgtaaatgaaatcatttactcagagatcgatcttcagagaattacaggtgagagaagaaagaatacgacattccagccattggatgaagagactctggtacgtgttccatttaccgtggaagagacaaagacatttttgacaagaacatttccgaaaaagccgttcgttccttctgatgaacagacccgcgcacagcgctgtgaggagatcctgacgatccaggcaatgggactgaagaaacgtctggctcatacgaatgcaagaactgctgttgtcggcatttccggaggtctggattctacacttgcactgcttgtaacggcacgcgcatttgacatgcttggaagagataagaaggatatcattgccgtgacaatgccttgctttggtacaacagacagaacttatcagaatgcctgtgagatgtcgaagaaagtcggagcaactttgatcgaggttccgatcgcagatgccgtgaatgttcatttccgtgacatcggacatgatccggaagatcacagtgtaacttatgaaaactgccaggcaagagagcgtacacaggtgctgatggatatcgcaaacaagacttggggaatggttattggaacaggcgatctgtcagagcttgcgcttggatgggcaacttacaatggagatcatatgtccatgtacggagtgaatgcttctgtaccgaagacactggttcgccatcttgtaaaatatgctgcggatgatacaaaagacgaagctcttaagaatgtactttacgatgtacttgatacaccggtaagtcctgagcttctaccgccgaaggacggagatatcgcgcagaagacagaagatcttgtaggaccttacgaactgcatgatttcttcctgtatttcatgcttcgttttggatatgagccgagtaaaattttccgtattgcatgtatgacatttgatggtgaatatgacaaagagaccatttttaaatggctggaaacattctgtagaagatttttctctcagcagttcaagcgttcctgtctgccggatggaccgaaggttggtactgtggcactttctcctagaggggactggagaatgccaagtgatgcctgcgtggcagtatggatgaaagatcttgaggcttgcagagtataagaaaataaaaattgcgggatgcaggaaacatgcattccgcacaaacttggggaaagaaaaggagaggataagatgaaactcatcagaacagaggatgcggtcggcagtgtgctttgccacgacattacccagattattccgggagttgtgaaggatgcggtcttccgtaaaggacatgtagtgacagaagaggacgttccggtactgctttctgtaggaaaagaacacctctatgtatgggagaagcaggaaggcatgcttcatgagaatgatgcggcagaggtgctgcgccaggtctgccagggagagcatatgaatgcatctgaggcgaaagaaggaaagatcgaactgactgcacagtgcgacggccttctgaagatcaatcgcgagaaattaaatgaagtaaatgcgctcggtcagatcgtgcttgcatccagacatggcaatttcccggtgaaaaagggagataagatcgtaggaatgcgtgtcgttccgctggtgatcgaggaagagaagatgaatcatgtgaaagaactctgtggggaagagccgattttcacaattctcccgttccatcagatgaaagtcggaatcgtgacaacaggaagcgaagtttatcatggaaggatcacagataaatttactccggtcgtaaaagcaaaattagaagaggcaggcatggaagtacttggaaatgtactctgtgacgatgactctcagatggtaacagatgcgatcaatgaatggatcgctaagggcgcggaatttgtagtctgtacaggcgggatgagcgttgatccagatgacagaacaccgttatctatcagaaatgcaacggatgaggtgatcacttacggtgcgccggtacttccgggtgcaatgttcatgctggcttataaaggagagattccggttgcaggtcttccgggatgcgtaatgtatgcaagaagaacaatctttgatttggtgcttccgagaatcgcagcaggcgagagattaagtgtagaagatttcacagtgcttggagaaggcggactttgcttgaactgcgaagtatgtacttatccgaattgtggatttggaaaataataataaaaaagtgcttttaattttttgagttcaatagtattttgtcaactgtatttataacgtcacataaacacctgtaacggggcaggtgtttatgtgctattttattgaattcgcaaatttctcttttcagcaaaatgttgtatgttcttgacagaacggaatcgttttgttatagttagtccacatcaaaatctcagacaatatttttcttttaaattcgtttgtctgaaagcgctatctgaacggataacttatctcatattcaaggctatatcagcaagagattccattttgatgaattacgaaactataaaaaataaagaaatacaaggaggtactgtctatgggaaaagcagatgtaaatgttaacatctggctcaatgaaaagaagcggtttgctgatttatttaacggggttctttataaaggaaagcaagtgatacggccggaagagttggaagagataagtccagtggcatcggttagtataaaaaatcgggtagggaaaacacgaaatatgaaaaagtatcgagatattgtgatgcgatggaaaaataatgctacattcgttcttcttgcaaatgaatcacaggataaaattcattatgccatgccacagaaagtaatgctctatgacggaatggattatgaagaacagattcgaaatctgtggaaacaacgaatggagtgtcagaaacaggcaagaagaattggaaaacctctggaacatcttacggcagcagaatatctatccagatttagaaagaacgacaggctgataccaattatttcacttgttttttattatggatcagatccatgggatggtccacaggatctttatgatatgtttcgactggaaggaagcgaagaggaaaaggtcgttttagagaaatatttaccaaattataaaatcaatttggttgatgcagaacgcatgaatgagcaggaaatcaaatatttttcggaagatttacaagtgatattaaccatgctaaaatatagacatgaaaagaatgaactaaaagaatacatcaataaacagaaaagatactttcagaatgtagattatgagaccagtcaggtaatcaaagtatttttaaatatgaagtcaataccgggtgagacggatgaaaggaaggtgaatgtcaacatgtgtgaagcacttgaagaaatgtataatgatgctataaaagagggaatggaagctgggacaaaaaggaaattaattgagcaggttatgaaaaaagtaaaaaaaggactttcagcagaagaaatctctgatatatttgaggaagataccgaaataatcaagaaaatttgtattgcgattcagacatgtgaaggtcagtgtacaattgacgatgtttatgaacaattatataagtaatatgagaacaggagaacagaacatgaattcattttacattcagttgcaggcagaacttgcagaagcaaaagaagagctttgggcacagacgcagattgacggtgcagaagctggaaagaaaactctgttaaaaggtgaaccgaaggatacagacagtgtttttgtagatgaaaaaggtgaacgtatttttcaggagcgtatcagccgtccggcgaagctggtgatctgtggggcagggcatgtatctatgccaatcattcgcatgggaaagatgcttggattccatgttacggtggtagaagaccgtccgaagtttgctgatgatgcgagaagagcagaggctgaccaggtctattgcgaaccatttgaagatggtcttgcaaagattaaaggagatacagatacatggtttgttattgttacaagaggtcacagatatgacacagattgtctcagaacaatccttggaaagccaagagcttatgttggaatgatgggaagtaagagaagaactgcgatcgtaaaagaccagctggaggcagaagggtttgagagagatgtgcttgaagcagttcatacgccgattgggttgaaaatcgctgctgagacgccggaagagatcgcggtgtctattatggcagaaatcattcggattaaaaacagccgtgcaaagagcggcggatattccagtgaacttcttgaagaaattctgaaagaagatgagtgtggaaaagtgcttgcgacaattatttccagaaaaggttctgcaccacgtggcgtaggaacaaagatgcttgtatgcggagatggaaggatcatcgatacaatcggtggaggatgtgtggaaagtgagattattcagaaagcactcctcatgatccgtacggagcaggaaggattccaggtatgcaaggtagacatgacagcagaggcagccgaggatgaaggtatggtctgtggcggcgttgttgaagtcatgctcgaaagggtaaaataagcgctttgaaaaaagttaaaatgatagtagtaattgagagtggagaataagaaagatggatgatatcaaaattttaaaaggaaatattatctatacaaagacgaaagatgaatttgagatatgcgaacacggttatcttgtgtgtaaagatggaaaagtagaaggaatctatcagacacttccgttccgacttggaggggaaccaattgaggatcatggagattgtctgattattccgggaatgacagatctgcatatacatgcaccgcagtatacattccgcggtacagggatggatctggaacttctggagtggctggagacgaatacatttccggaggaagcaaaatacaaggatgtattatatgcgaatgaggcgtatgcgaagtttgccaagaacttgaaacatagttcaacaacaagagcatgcgtctttgggacaattcatagaagatcgacacttgttctgatggatcatctggaaagaagcggtctggtcacgatggtcggaaaagtgaatatggacagaaattcaccggatgaacttcgtgaaggtacacaagagtctgcggaagaaacagttgaatggatgaaggatgtgcagcataaaaagtataagaatacgctgccgatcctgacacctcgttttattccgagctgtacggatgagcttctggatatgctgaagatggttcagatgcgttatcagattccggtgcagtcacatttatcagagaatttatcagagatcgaatgggtaaaagaactttgtccgtatgcagagttttatggagatgcatatgatcattttggtctgtttggagcagatgcaccgacggttatggcgcattgcgtatacagtacggaagaagagatccagagaatgaaagagaacggtgtgtatgtagtacattgtccggaatcaaatgagaatctttcttccggaattgcaccggtaaaacgttatctggaagaaggactttctgtaggacttggaagtgatgtcgcaggaggatcgacagagaatcttttccgggcaatggcacatgcaattcagatgtcaaagatgcgctggagacttgtcgatcagaaatatccggcattgaagtcagaagaagcattctatatggcaactaagggtggcggatccttcttcggaaaagtcggaagttttgaagaaggatatgaattcgatgctgttgtattagatgacagcagacttgaatcttcccgtcagatgagtgtgaaagatcgtttggaaagaatgatttatcttgctgatgagagagaagtgaaagcaaaatacgtcagaggaaataaaattatataaaacacatgaaaaaacctcaggtccgggtgttgcagcaccgttctctgaggttttttcattttctattttaggagttttaagtaattgacttattcaatcgatttttcaatattaaaggtggattcttgttccagtctcaccaagaattccgtcttttgctttctcaagcagtgtgatcagtgactgtcttccaggtttggattcagcaaagtcaagagctgcctgtaccttaggaagcatagaaccaggagcgaaatgtccttcttctacatactgtttcgcttcttcaactgtcacatcgtcaagccatttctcatccggctttccgtagttcagtgcaactttctctacagcagtcagaatgataaggaagtctgcgtcgagctctttggcaaggagagcactggcaaagtctttatcaatgactgcacttgcacctttcaggtggttgccctggcgcataaccgggattccaccgccgccacaggcaattacaaggtcaccggagtcaaccattgtacggattgtaccgatctcaacgatctcctgcggttttggagaagctacaacacgacggtatccgcgtcctgcatcttctttcatgatataatcatatttttcagccataacatcagcttcttccttagaaaggaatttaccaattggcttggatggtgtttcgaaagccggatcatcagcatctacacgaacctgagtgatcattgtagcaaccggaatatcatggattcctctgttgaacaattcttctctcagggcattctgcaggtcatatccgatgtaagcctggctcattgcaacacatacagaaagtggtgtgtttggctgtttctcatcctcatgtgttaatgcgatcatagcgttgttgatcataccaacctgaggaccattgccgtgtgctacgactacttcgcagccttcctgaatcaggtctacgatcgcgcgtgctgtaatcttaacagcagccatctgctcaggaagagtattgccaagggcatttccgccgagggcaatgacaatacgttttttcttttccattttaggatcctccgtatttactgtaaaggtattgtacaggtctgaaagattcaggcctgtacaataagttactaaattaaggtaactgtgaaactatttttgtctgagaaatttaaacttactcaaaaattctggacattcctctttcttcgagcttcttcaggatttcctgtgggttctcgaatttagcaaggaagatcatagctgcgatgatgtatggtttgaagctagcttctttgtaaagtggatctctgtaacgatcgaatacggaagcgtcaacttcaccttcttcacagcttacgcctgagatgtcagctggcagacagtgcatgtaaagagcttttccgtcttttgttgtagccatgagctcttctgtacaagcccagtctttgtgctctgcgttctgagcaagaagttctttctcaagagctttgataccttctgtatctccgtttccgtaaagctctgtacgtttttccatagctgcaaatggagcccagctctttggatatacgatatcagcatctttgaatgcttcagccatgttgttagtcttcttgaaggatccgcctgatttcttagcgttctcttcagcaattttctcaacatcctcgaatacttcgtatccttctggatgagcaagaacaacgtccattccgaaacgtgtcatcagaccgatgactccctgtggaacagaaagtggttttccgtaagatggtgagtaagcccatgtcatagcaagttttttgcctttcaggttctcaactccgccgaactcatggatgatgtgaagcatatcagccatacactgtgttgggtggtcaatgtcacactgaaggtttacaagtgtaggtttctgctcaagaattccgtccttgtttccttctgttacagcgtcaacaacttcgtgcatgtatttgttaccttttccgatgtacatatcatcacggataccgataacatcagccatgaaggagatcatgttagctgtctcacgaactgtctcaccatgagcaacctgagattttccttcgtcaagatcctgaacctcaagaccaagaaggttacaagcagaagcgaaagagaaacgtgtacgtgtggaattgtcacggaacagagaaattccaagtccgctctcgaatacctttgtggaaatgttgttctctctcatgtaacgaagagcatcagctactgtaaatacagcttcgatctcgtcgtctgttttctcccatgtaaggaagaagtcaccattgtacatctctttgaagttgagtgcgttcagtttgtcaatatatccctgtaattttgcgtccatctttaaaatcctcctgattaaaatgaattatttgtttttaggtttattagccaaggcagttccggccggaaattatccggtcagaacgccataggttcaatgaattggttgcgtgatcacacgcaagtgcgttagcaaatactgaattactcagcgtaagacagtggaagtgcagcgtatactgcagcacatgttacgagatcctgtttccatgtcatctcgtttggtgcgtgagcctgagcctcagctccaggtccgaatccgatacatgggattccgtttctacccatgatagaaacaccgtttgtagagaatgtccacttatctgtcagaggacgagcctgacgcatctcaagtgtgtcagcagcaccgattctctgatctccgtaaagtcctgtgtaagctttctcaagagctttagttactttgtgatccttcggaatagcccatgttgggaagtagcactcgatctcgtatacacatcctgtgtaggacggacgatcatagttgtacatagaaacaacaacgtcatcaccgtatttcttaacgcttggcaggttacggatctcatctaagcagctctcccatgtctctccgaatgtcatacgacggtcaagagatacagcacaggaatctgctactgcacaacggcttggtgatgtgtagaagatctgagatgttgtaactgttccacgtccaaggaaacgagcctcttcgtagtcagggttgaatttcgggttaagcattttaacaagacctttgatctctgtctcgtcagcgtcatcgttctcgttaagagcacgaacatcctgaagaatgtcagccatcttgtagattgcgttgtctccacgctccggagcagaaccgtgacaggaaactcccttaacatcgatacggatttccatacgtcctctctgtccacggtagataccaccgtctgtaggctctgtagaaactacgaactccggacgaatcttgtcttcgttgatgatgtactgccagcaaagtccgtcacagtcttcttcctgaactgtaccaacaaccattactttgtatccttctggaatgagtccgagatctttcatgatctttgctccgtatacaccagatacgataccgccacactggtcagatactccacgtccaccgatctctgtctctgtctcgtatccatcgtatggatcgaatttccagttatcgatgttaccgatacctactgtatcgatatgtgcgtcaaatgcgatgatcttgtcgccagttcccatgaatcccataacatttccctgtgggtcgatgacaacttcgtcaaatccaactttcttcatctcagcagcgattgtctctacgtgagctttctcatcacagctttctcccggattttttacgatagcacgaaggaaagcagtcatgtctttctcatagccttttgcatactctttgattttgttaagatccattgttcttctccttttgaaataaaatcttgttttggtgttacagtttcttcttattgtattgcgagaaatgattatctctcatttccgtcccagacaattgatttgtatctatccggatcagtgtctccctcagtagagaagagaagtacttttgagttttcatccaatccgaggtgctctctgagcggtttgtactcatccattgtcatgatgcacgcaagtgttccaaacggtgcggctccagattctccggaagtaacaggctgatcacctttgaaaggtgcagcaagcatacgcatacctttggcagcaacccagtcaggtgttgcgataaatgtatcaacgtggtttttcagaatatcccatgaaattgtgttcggctctccacaggcaagaccagccatgattgtaaccatgtctccgtctacgatgcggatagctccgtccttagcacatgctcctttgtaaagacatgcagcaggcgcagcttcaacaacaacaactttcggtggattttccggatagcggttagcgaagaatccctgaactgctccggcaagtgaaccaacaccagcctgaataaatacatgtgtcggacgctcacatccagcttcatgaagctgatcatcagcctcgttagccattgttccgtatccctgcatgatccatgccggaatctcttcatatccgtcccaggctgtatcctgaaccattacgccgttctctgtcttctctgccatagcgttagccatacgaacacattcgtcgtagttttcctcttcgattgtagctttcgctccttctttcaggatgttgttcagtcttgtctgagtggatcccttcggcataagtactacagctttctgtccaagcttgttcgctgcccatgcaacaccacgtccgtggttaccatctgttgcagtgaagaaagtagcctgtccgaattcattacgcagttcgtcagatgtaagaacgttgtaaggaagttctgaaacatcctttcctgtctgctttgcaatgtagcgagccattgcgaaagatccgccgagtactttaaatgcgttcagtccgaaacgataagactcatcttttacatagacttctttcagtccaaggtatgcagccatgtgatccagttttgcaagtggtgtaacactgtactgcgggaagctctcatggaatgcgcgagctttcgctacattctcaagtgacattacctgaagctgagagtcatctgtttttggcatttcgtttactgcccatttgatagtttccattatagtgacctccttaaattaatacgtgtcatttgcccatgtaactgtaaagtgtgaatttcgatatccccaaatacgaagaaactttatcgccggactttgtaataaggaaagcaccggcatgatccagatactggacaacagcaactttgtcatctttgttcatcattgcaactggctttccgacctttgcaacggcctgctcgatcaacaaatccagaagttcatttacattatgtgtgatctgccgtggcgaatcacctgtaagatccggaagattgtctttcgtagcgatcaaagactgaattgctgtactcgcagctgtaaaagctgtgatgtcatagtttaatgagaagatgtatgagattgatccgtcatcgtctcttatatagaaggtactcgatttcaggatccgtccatcttctgttttagtaagataggaaagcttatcatgaatcgttgacggatccgactgaagtgtctcaagaacaattcctgaaggaccatctccggtctgtcggttcgatacatgtccgttctcgatgtacacgatcgatctctccagatcttttgtcttcaaatcatgaattgcaatctcacaggaacttccaaattgaattgcaagtccgtgtgcaagctgcttaagaaaatctaaggtatggcgcatatgtccacctgcctttctacatgctttctgtcttcataatcccataatatcataaaaatcacgatagtcaatacctttcctaaaaattttttaggtaacaaaaaacttttttagatttcttgttgcatttagacaatttagatgttattctatgtgtatcagagacgttgatgtacgaaatgcacataacaggcagatggcattttaacatcaaagtgtagaaattcataaaaaggagaggttacaattatgttgatcttaggtaatggtagagttgtgacaagaaaccctgaatgtccttatatggaagagggcgcagtagcaattgatggtaaagtaatctgtaaggttggaccaacagatgagttgaagaaggcttatccagatgcagagtttattgatgcaaaaggcggagtgattatgccggcattcattaatactcatgagcatatttatagttcttttgcaagaggacttgctattaatggatacaatccaacaggattgctcagcattcttgaaggaatgtggtggacactggatagaaacctgacactgaatgatacttatttaagtgctatggctacttatattgattctattaagaacggtgtaacaacagtatttgaccatcatgcaagctttggagctatcaaaggttccttatttgaaattgagagagcagcgaaggaaacaggaattcgttcctgtctctgttatgaagtttccgacagagatggaaaagacaaggccagagagtctgtaatggagaatgcagaatttattcgtcatgcactgaaggatgatagcggaatgatcgccggaatgatgggtatgcatgcacagttcacaatctcagatgagacaatggaacttgcagcagcaaacaaaccggatgaagttggttatcatattcatgttgcagaaggaattgaagatctgcatcactgcctgaaacattatggaaagagaattgttgaccgtctgatggacttcaatattcttggggagaagacactgcttggacattgtatctacatcaacccacatgagatggatctgatcaaagatacaaacacaatggttgttcataatccggaatccaatatgggaaatgcctgcggatgccctccgacaatggaacttgtacacagaggaatccttacaggacttggaacagatggatatacacatgatatgatggaatccttcaaagtagcaaatattcttcataaacatcacctttgcgatccaaatgcagcatggggagaagttccgaaaatgctgtttgagaacaatgcaaagattgcaggacgttatttcgaccagaagctcggagttcttgaagaaggcgcagcagcagatgtgatcattgttaattacaatccgctgacaccaatgaatgagaataacatcaatggtcaccttgtattcggagtaactggacacgatgttgtgacaactgttgcaaacggtaaagtattgatgaaagacagaagactgacagagattgacgaagcgaaagttatggcagactgcagacaggcagcagccgaacttggaaaacgtatcaacagtcgttaggcttagattgacggataccgttcattaatgttaacatatataacagatgtggacagtatatttgatcgcacatttcgtcaaaactaaccggaaaggacaataaaataatgaaagaaaagaaatcagaagcacctcgcagaggaaacgaagaactgtttaagtgggatggtaacccgacatttggtcagatacttccgcttgctgcccagcatgtacttgcagcagttgtaggatgtgttacaccggcaattctggttgcaaatgcagcgaataatgcaggcggaaacgtaaacatgggtctcttaatccagatgtcacttgtatttgcagcattatcaacattccttcagctgtatggaaataagatccatcttggatccggacttccggtcatcatcggtgtaagttttgcttatgttccgacaatgacagcaattgcagcacaggctcaggacgttaacacgatttttggcgcgatgatcgtaggtggtattgtagcaattatcgttggacttactattaagcagatcagaaaggtgttcccaccactggtaatcggaactgttatctttgcgattggtctgtctctttataagacagccattaactacatggcaggaaactccgcgaacacatatgaagtgatcgtagagcagagaggtcagacagcagcacttgtttatggttcctggcagaactggcttgtatcccttgtaacactggcaatcgtaatcggtctgaaccattacggaaaaggacttttcaaacttgcatctatcctgatcggtctggtctgtggatatgtacttgcattgtgctttggaatggttgatttttcagcactttcaaacgcaggttggttccagcttccacaaccgttcgctttcggtgtaaaattcgatatctcagcgattatcccgctggcgattttgttccttgtcaattccattcaggcaatgggagatttctccgctacaacaagtggtggtatggatcgtcttcctactgaccaggagctcaacggtggtatcatcggttatggtatcagtaatatcgtaagtgcatgtttcggatgtcctccgacagcaacttacagccagaacgtaggtattgttggttctacaaaagttgtagcaagaaaggtattttcactttcagcatttatccttctgattgcaggactgattccgaaattctcagcacttctgagaacaattcctcagtgtgtacttggtggagcagtagcatctgtattcgcaggtatcgcaatgacaggtatcaagcttcttgtaagtgaaggtatgtctacaagaaatacaacagttgcaggattatctattgcaatcggtatgggtgtatccttaagtaacggatgcttaaatcagatgacatcaacaatttacgatggattaggaatgacaatgggacttgagaacttccagtccatcatcaataacacatttgcatcatcaccggttgtactggcgacaatttttgcagttattttgaatctggttcttccgaaagatccaaagccggaggcaaaatagaaggaaacagatctttgagaaaagacaggttcttggggaataatctgtcagtgatttcaaagatttaatcattacggaagaacctgccgatggcaggttttccgtgataaaagaaaaaaagagaggtaaaaagtatgagtgaaattatgagacctatgtcatttgaacagcttttaaactggacattgacagagtacaaagagaatggaacagtatttggagagcgtcatccatatcatgcggacagcaagttcaaccgcacaatcttcggacgcgatcttgagacaccaatcggaccggcagcaggtccaaacactcagctgacacagaatattatcgcagcttactacacaggaagccgtttcttcgagctgaagacagttcaggtaatggacggagacgagcttgcagcatgcatcaacagaccatgtatcaaggctgatgacgagtgctacaactgtgagtggtctacagagctgtttgttccacaggcaatggaggagtacatcaaagcatggttccttctgaaagtgatctcaaaagaattcggacttggaagcatggacggattccagttcaacatcagcgttggatatgatcttgccggaatcaaatcagagaaggttgacacattcctgaacacaatgcagcatgcacaggattcagagattttcaagcactgcaaggcttatcttcttgagcatgttgacctgttcgagaaagtgacagcagaagatatcgaaagcatttccggtgatatctgtaattctgttacaatctctacacttcacggatgccctccggaagaaattgagaagatcgcaatgtatctgatcacagaaaagggattccatacatttatcaaatgtaacccgacacttcttggatacgagtatgcaagaaagacaatggatgacatgggatacgattatatcgcattcggtgacttccacttcaaagacgacctgcagtacgaggatgctgttccgatgctgaacagactgatcgctgtctgtcaggaaagaaacctggagtttggtgtgaagatcactaacacattcccggttgatgtaaaacagaacgaacttccaagtgaagagatgtatatgtcaggaaaatctctgtacccactttccatctccgtagcaaatatgctggcaagagattttggtggaaaactgagaatctcctattcaggtggtgctgatttccataacatcgaaggaatcatcgatgcaggaatctggccggtaacaatggctacaacaatcctgaaaccaggcggatatgacagactttgccaaattgcaggacttcttgagaaagaaggcgttgtattcacaggtatcgacgctgccaagacagagaaactggttgaggaagcaaagacaagcccatatcatgtaaaggctgtaaaaccgcttccgtccagaaagatcaacaaacaggttccgctgatcgactgcttcatcgctccttgtaaagaaggatgcccgatccaccaggatatcacaacatatctgcagcttgtagaagctggtaaatatgaagaagctatggatgttatcacagagaagaatccacttccattcattacaggaacaatctgtgcacatgcttgtatgggcaaatgtacacgtaacttctatgaatcaccggtacatatccgtgagatgaagcttgaggcagctcagaacggatacgaagcactgatgaacaagctgacagcacctgcaatcacaaaagaaggtaaggcagcagtgatcggtggaggaccggctggtatggcagctgcttacttcctgcgcagagccggaatggcagttacagtatttgagaagaacgacgctctcggcggtgttgttcgccacgtgatcccagaattcagaattcctggaacatctattgataaagatgcagcacttcttgagaagatgggcgttgaagttcgtctgaacacagaagtaaaagatacagcagcactgaaagcagaaggatttacaacagtgatccttgcagtaggagcttctgagcctggagtattaagacttgagcagggtgaagctaagaatgcactcgagttcctggctgacttcaaggcaaatgacggaaaacttgatatcggtaagaacgttgtagttatcggtggtggtaacacagcaatggatacagcaagagcagcaaaacgtacaacaggcgttgaacatgtatatcttgtatacagaagaacaaaacgctatatgccggcagacgaagaagagctggtaatggcagtagaggacggcgtagaattcatggaactcctttctcctgttaaacttgagaatggaaaactgatctgcgaagttatggttcttggcgatatggatgcttctggaagaagaggcgttgttaagacaggagaactcaaagagatcccggctgatacagtgattgcagctgttggtgaaaaagttccgactgctctatacgaggcaaatggaatcaacgtaaatgacagaggacgtgctcttgtaaatgaagagacattagagacaaacgtagagaacgtttacgttgttggtgacggacttggcggaccggctacagtagtagaaggtatccgtgatggtctcaaagctgctcaggcagtgatcggagagactcttgtaagagatttcgatgcagagacagatgaagctgttgtatacgagagaaagggtaacctcgaagacgtacgcgaagacagcacagaggctaagagatgtcttaactgtgcaggaatctgtgaaaactgtaaggaagtttgcccgaacagagcaaatgtagcaatcaaggttccgggactggagaaacatcagatcatccatgtggattacatgtgtaatgaatgtggtaactgtaagagcttctgtccgtacgacagtgctccgtacctggataaattcacattattcatggacgagaacgatatggcagacagcaagaatcagggatttacagtactggataaagatgcagtacactgcaaggttcgtttctgtggagagatcctcgactggacacttggagaagagacaaagattccggaagcacttcagaaagtaatggagactgtttgcaaggactacacatatctgttaagataatagcagaaggtttatgtgagattgctccggtggaaattgagtgagaccagagtgataatatgtgagatagatagctcacaggcatttgcctgtgggctatcttcttttcaaaagacgcagaaatatagaaagaagggatctgtaaaatgataagctatttcagagatgacagactttgtgaagcagactctttcttatcggtagtaaagcctgactatacagaatgtccgatgatagctgctgtcggtgcgggaggaaagacctctacattgagaaggcttgcagaagagtatgcgctgatggggaaaaaggcaattgttcttacaacaactcatatgagagaagagacgactccatggagttgtgtggctgaagaggaagagtggattagtaaagggaaagcgctgcttgaacgagtgaaggaatgccttgaacaatatggacaggcctggattggggcaagagcgaaaaaagggaaaatgagctgcgttccggagttgattctggcagagatagaaagctggaatgtgccattacttgttgaagcggacggagcaaggatgctgccgttaaaagtaccgggagaacaagaacctgtgctcctgccacagacaacatatgtattctctgtctacggaatggatgccttagatcaaaagctggaagaaatctgctttcgaagtgaaaaggcggcagagcttcttggaaaacagccggaagatcaggtgacagaagaggacctgataaagcttgcctgtcatgaacagggcgggcgaaaaggctgtccaaagcaggcagagtatattgttgtactgaataaggcagatacaaaggagcggcgagacagagcgtgtaagattgcaaagtgcttgtatgagaatggaatcaagaatatatttgtgacatcttatatgctgtaataaatattgtagaaaaagtgcagagattattcttgaacgtaaataaattagaaaataacggagaatcatagaagattctcaggaaaatagatgggaagtattgagatgaagatattgattaaaggtgcgggagacctggcaacaggaatcgcatccagattatatggcgcagggcatcagatcatgatgacagatattgctgtgccattgacggtccgcagactagttgcattttccagagcggtttatgaaggtgaggcagttgtagaagatatgacggcgcgcctggcaaagaatcaggaagaagcagaggagattatggaacaggtagatatccctgtgatcgttgatccaaaggcagaatgtatacagtggtttcagccggatgtgatcgtggatgccatccttgcaaagagaaatctcggaacaaagatcacagatgcaccatttgtgatcggagtcggacctggatttactgccggggaagactgcaactgtgttgtagagacaaagagaggacatacactggggaatgtaatctgggacggaagtgcgatcccgaataccggagttccgggaaatgttgggggatattctattgagcgtctgatcaaagcatccgcagatggggtgatcgaaccgaaggctgtgatcggcgatctggtacgaaaaggacagatcgttgcaattacaggcggagagccggtttatgcgctgatggacggtatcgttcgcggaatgcttcagccaggtgttcaggtgacgaaggggctaaagatcggagatattgatgctcgtgcaaagcaggagcattgccggacaatctcagacaaagcaagggcgatcggcggaggtgtgcttgatgcagtctgcagttatgaaaagagcagaggaaaatacgcattgatcttgctggcggcaggtcagagtgttcggttcggttcagataaactgaaagcagttgtagaaggtgaagcaatgtatgaaagtgcgatcagccggtttgaagcatttcagggattcaagtcttatgtagtgacaggaaaagaagagattacactttcagcagagtcagcaggctgcacggtggtatgcaataaagaaccggagaagggaatctctctttctgtaaagctcggtctgacaaaggcaatcgaggatgcggatgaaaatggaacaccgcttcgaggagtcctgttcagtgtctgcgatcagccaagattaaaaaaatccacgattcagagaatcataaatacagcatttcataatccgggaaagatcgtttgtgcaggagaaggaacaagaaatggcaatccggtcttgtgggataagagattctttgataaacttttggagttagatggagatatcggtggaaagaagatattgaaagaaaacttagattcgctgaaaattgtgccggtacaggcgggagaacttcaggatattgatcgcaaagaagatctcggaacggcataatgatagaattgctggttgcatatagtgtgaacagtaataaaaatagcagcggtgagctgaaaggagaatgcaaatgcgggtaggagcagtgattgcggcagcaggaaaatctggtggatataagagttatgataagatgaagtcggtggatggaatccaggttctgcgtcagatgattttaaatttcaagagagcaggcgtggatgagatcgtgctgatcacaggataccaggcggagcaggtggagaagaaactggcgaagcttggtgcagtattccttcgcagtgaagattatgagaaggaagagatgatcacgtcagcagttcgagggatgaactacctgaaaccgcgctgtgagaaattcttcttctgtccggcaggagtttctcttttcacagaagataccgtacgtgtgttgatgcaaaaagcgaaagaaaatgaaaacgatcaggagaaagtctatgtacctgtctgggaagaacgaaaaggacatccgatcctgatggatcgcagtatgatcgatcagtttgcttcttatgaaggtgaaggtggacttaaaggcgccatggatgcgctgaatgtagaacgcattttcgttccggtggaagacaacggtgtagcgatttactccggacagggagaatctttccgtgagattttcaaagagaaggaaaaggagagaagaatccgtccgagagtgaagcttcagttggagaagaatgagaacttcttcggtccgggaattgtattccttctgcgtcagatcgatacacttggttcggtaagagacgcctgtgcaaagacaggaatgtcttacagcaagggctggagcctgatcagaagtgcagagaaagaactcggatataccgtcgtagagcgaagtccgggaggcaagcatggcggtgtagccagtgtaagcgaagcagggaaagacatactcagaaaatatgaactgttggaaaaagatgtggcgaaatatgcagagaagagatataaggatatatttgaatcttgatctgtcttttacacgcaatatgtgaaaagaagaaagctaatattagcgaaaaaagcggtcacatgacattattaaaatacagttaatgaaaaaagttgcgtaaatcgcaactttttcaagaaaagcgattgttaaaataaaacaaatcggttataataagaccatcatttataaagaaaagacaggaataattacaacatttttatgaacaaggcgcctgtcaggaggagataggatgaaaaagagaattttagcagcaatgatggcagccgtaatggtgttttctatggctggatgtggatccaaagccgacgaaaagacagacgacacagcaaaaacagaagcaactgacaacaaagtcagtgatgaagaagaaacagagatccaggtatttattgcagccagcttgaagaatgtaatggacgaactcgcagcacagtacaacgaagaacatccgaatgtaaagatcacatacaatgcagacagttcaggtacacttctgacacagattgaagaaggatatgagtgtgatatcttcttttcagcagcacagaagcagatggaccagcttgagtccgatggtcttgtagtagacggaacaagagcgaatgttgttaacaaccaggtagtagttgtgacaagaaaagacagcggaacaaaggtaacaggacttgataacttaagcgaagcagaaagctttgcacttgccggtggaagcgtaccggtaggtaagtatacaagaactgcacttatgaatatgggtgttcttccgaaggtggatgatccttcagcaatcacaacagaagaagtatcagaagcacttggcggacttgagatcagcgagcaggacaacgtaagcaaggttctttccgcagtagtggaaggatcttgtgaagttggaacaacttactactctgatacatatggattcgaggacgaactcgatattcttcagacagtagggtatgatctgacaggaaatgtaatctatccgatcgcacgtgtagtaaatgatgaggctgatgatgcacagaacgcagtagcagatgatttcatcaagtttgttctgtcagacaatgcaaagaaagtatttgagtcttattacttcgatacaaatgtagaataaagatagtgtgatggtaacggatgtgttactatagaagcagagggttactgttcactcccgtgtcaatcactttgctgattgacacggaggatgcgtgttttgacttgaatgcatctcgccccatcgccaaaggcgatttaaaatggcgagatgcgttgctggtcgcacatcgtgtgaacagtaacagcagaggctgccagaaatgaaaagtttcggacagcctttttcttatagttgtaaaggagagtgaatgatagaatggatgaaatgatggaaatcctgaagaatctggactggagcccattatttatatcaataaaaacgggaatcgtagctacgatattttccttttttcttggaatctatgcggcacgtaaggttgtgaagacaactccggggaaaaaggctattatagatggaatactgaccttgccaatggtacttccgccgacagtggctggcttctttctgttactgatcttcagcaggagaagaccgtttggaatctttttatttgaaaattttggaatcaaagtagtacagacatggcttggatgtatcattgctgccacagtaatttcatttccgctgatgtacagaaatgcccgtgcagcgatggaacagatcgatgtgaatttgatctatgcaggaaggacacttggcatgtctgatacagaaatcttctggaaagtagtgatcccgaccgcaggacctggaatcgcatccggaacgattcttacatttgccagagcactcggagaatatggagcgacatctatgcttgccggaaatattccgggaaagacaggaacaatctcgcagaagattgcaatggtcattcaggacggagactatatgacagcgggcgtgtgggttgcgattgtcatggtgatcgcattcctggtgatcttcctgatgaatctgatctcgggcaagaaaatgaagaatgtcaagaggtggtaagagatggcgatagaagtaaagattcagagaaaacggaatacatttgagctgaacatagattttaaaagtgattctaaacgaatcggaatcctcggcgcatccggatgtggaaagagcatgacactaaagagtattgcaggaatcgagccgccggagagcggattgatcaaaattgaaggaaagacagtttatgacagcgaaaataaagtgaatttaaaaccgcagaagcgtaacattggctatctgtttcagaattatgcacttttcccgacaatgacggtggaaaagaatatcgccgccggattaaaaggaaaaaagcaggagaatgcaaagcgtgtgcgtgagatgattgagaaatttcagctaacaggactggaaaaacgattcccggcagagctttccggaggtcagcagcagagggtagcccttgcgagaatcatggcttataaaccagatgtgattctcttagatgaaccattttcagcacttgatatgtatctgaaggaccgtctgcagcaggaattacaggaacttctcgaagattatgagggtactgtgatcatggtgtctcacagcagagatgaagtgtaccggttcagtgaagaactgctgatcatcgaccaggggcagattgtggcagcagggaagacgaaagaattgttccagaatccgcagagaaaagaagcggcacggctgactggatgcaagaatttcacaagagcagtttatgtggatgagcataccgcagaactgacagactgggggattacgttgtgtacagagcaaagaaatatcccagaaaatatcaactatatcggttatcgtgcgcatgattttgtcccaatctggggagaaggtggaaagaatcagattccatttctattagagagtaaggcagcactccctttcgaagataattattatctgaagcctgcaaatgaagaggcagatccgcctgtgatctcctggtttgtacagagagagaatcaggagaagatccgggaaaaaggaatgccggatgcgctgaagctggtggaggaagaagtgctgttcctggaatagcatcttcccatatagatgatttttgagtgaatcgttacgttttgaaagaaatgtaaaaactccttttcaggatatttacatcagggaaaaactagtatataataagcacgttttttcgaaaaaaggaggacatcatgaaatcagtacagaatgatatgactgttggaagcccaatgaagatgatcttaagttttacatttccaatctttctgggaaatgttttccagcagttttataatatggcggatgctgtgatcgtaggtaagttcgttggaacgaaagcgcttgcagcagttggaagcacaggaacaatcatgtttctgatctatggatttgtagttggaatgacagccggatttactgttctcacagcgcagaagtttggcgcaggagacatgcaggggatgcggcgcaccgttgcgggggcaggaatcctctcattcttgatcggactgtttcttacggttacctttatgttatttatgaaaccgctgttacatctgatgcacacgccgtctgatatttttgcagatgcatataagtatattatgatcgtcagcggaggaatcctggcgcagatgctttataacttgttatccagtattttaagagcactgggaaacagtaagattccattgtatttcctgatcatcagtgcgttgctgaatatcgtgttggatctggttttaatcattgtatttcagatgggcgcaccgggtgcggcaatcgcgacggtagtagcacagggcatatcaggtgtactctgtcttatttatattatgtggaagattccgcttcttcatctgaaaaaggaagactggcatgttggcgggcagatttgcgcgattcagttaaagatcggacttccaatggcattgcaatattctatcacggcaattggaactatgatggttcagtctgccctgaatattttgggatctacgcttgtggcggcatttactgcggcaagtaagattgagcaggttgtgacacaggcatatgtagcgatgggaacaacaatggcaacttacggagcccagaatatcggagccggaaatgtaccaagaatccgtcaaggtttcaaggcgtgtacgattcttggtatcggttactctcttgtagcagcaacatttatcatgacagtaggaaaatacatgacctatctgtttgtctcagaggatgtggatattatcatgagttctgtggatatctatttgaaatgtatcggacttttcttcattccgcttgcaattgtgaatatctacagaaatggaattcagggactcggttacggactgctgccgatgatggctggtgttgctgagctgatcggaagaggtgtggtagcgcggatcgcagcaagagagagaagttatcttggtgtttgcctggccagcccggctgcatgggtgctggcaggaggcctcctgatcgcgatgtattattatattatgaatgttcatatgaagaagatgtttggggattataatcagaaggtctgattattcacaatgtgcattgcatcgcggttcgcattcaaccatttggatttctcagtttcaaagcgttcgaaaagccaggcaatagcttcatccattccctcatcggagagcggaaatgtcttttgttctttctcttcttccggtgtatcttcaaagcaccacggttctggataaatgaatacggtgaaggttgtgctgctttttccgtcatctccgcgaaagaaatagcgcattccgtgatgtgtacctgaaaatggttctttcttaagtcccccgtaaggaatcagttttttatcaatcatagtaatacaatgtcctttcgaaaaaagtaatttgttttgttattgcgtttttgaaaaaaggaagccagaagtctggcttcctttttattatagtggaatgcgttttcttctgcaagaaatgatttattccatagcttttttggcaaattcagttgtgacaagtttttcataaggagcgcgtgaatccagttcaccggcactttccaaaatatcctgaagcagctcgaaactctctttttcaaatataagatctgctttccaggtgtcctgtgcataataacggtttacaatcgctgtgatggttttaagatctgtttcaggaaattgaggggcaatcacggaagcaatctcctctggcgtgtgaatctgaacaaaatccatacctttttgaagcgcatttgtaaaggattggataatctcaggatgtttgtcgagataactcttctttgcgctgtaggcagtgtaaggaacatagccgctgtcagtaccaagtgaggctacaacatatccttttccttccatttccaaagcggttgcacttggctcgaattcaacagtaaagtctccacttccctctgaaaaggcggcagcagtggaaccaaaatcaattccctggttgatgttgaggtctgtttgtggatcaattccatttttctttaaaatatattcaaataccatttccggcataccaccttttctaccaccaagaacatctttcccttttaaatcagtccacttaaaatctttcatctcttctctggcaacaagaaaattaccggcgcgctgagtcagttgggcaaagttgacgacagaatcgttagcaccttcgttatatgtgtagatggatgcttctgatcccatgaatccaatatcagcttcaccggagatgacagcagtcattgtcttgtcggctccaaaaccagttacgagagcgagttcaattccctcatcttcaaaatattcattttcaatggcaacatacataggggcatagaagatagaatgggctacctcgttcaatgtcacagagacaggagcagaactggtatctgatttggttgtgttggagccggtttctgttgtgtcgattttggaatttgcatccttatctttggaagaatcagaaccgcaggctgataacagtccaacagtcagagcagaagcgagtattacggaaatcaatttctttttcataaatcctccagagtgatataagattctcgtttaaaatatgcaagaaaaaagaataagtgtcaaattctactccaaaggggtgttcattttggaaaatatcctttatgcttagtataaacagaaagtaggtgaagcgtatggatcttgttaaaattggaaaatatattgcagggaaacggaaagccctgggaatgacgcagaaacagcttgcagaaaaattaaatatgagtgacaaatcagtatcaaaatgggaacgaggagtttcccatagttaaagataccacaccaaatatgatgaacccacgcttatacactaccagctataataaaccgcaaggacagcaatttgatgatactgctgtcctttcttttataaaattgcagtacacataaaaaagctgtaaaatgataaatatatttgtccttgtaacaattctcggacatttgcctgttatactatctgcaaaaagcaaaggaagtgagaatatggagcagattttaattgtcgaggacgacagttttttgaataagatgttagactataacctgaccgcagacggctacggcgtgacttctgccctaaatgccagaaccgcagccgaagccatccgccagcgggaatttgatttagtgctgcttgacatcaacctgccggacgggaacggttttgaactgtgcaagctgataaagccccagcacccggacaccatcgtaatattcctgaccgccaacgatcaggagagcgaccagatacggggctatgaggtgggcgcggtggactacatcacaaagccctttgtgatcggggccttgcagcgaaaaatcaaagccatgttcgccatgctggaacaccacaaaccggccaaggacatttacgacgacgggcggttgtttctggacttctcggagcagacggcttccttaaacggcaagcccctgactctatccccgatggagtacaaaatgctgaacctgtttcgtaaaaatccccggcaagtgctgacccgtgggcagcttttggaaaagctgtgggatatagacgagcggtttgtggacgaacacaccctgacaacctccatcagccgtattcgcagcaagattgaagccgacggcggcgcaccctacatcaagaccgtttacggcatggggtatcaatggacgggaggcgaggtaaaatgaagtttcaaaacctctcggtaaagcggctgtttggccgggtggcaatggagcttgtcctctccatgtccgggatcaccatagccctgtttcttgtgacaaaacagattgcggtgctgctgacaggcgggacgctgctgctgtgcgcccttgtggggatttttgtactgacgcaggcgtttggaaagcggctgtcgcagtttaccgctgacctgtgccagaccttagaccacatgatcgccgggaatgaagcgccccagcggccagaggacagcgaaacccagcttgccagaatcggacaccggctggcaaggctttaccagatcatgcaggagaaccgccgccgggtggacgaggaacggcaggagttacagacccttgtatcggatatttcccatcaggtgaaaacgccggtaagcaatctgaaaatggcgacggacaccctgctggaaaagcccatgaccgaggcggagcgcaccgactttatccggggaatccgcagccagacggataagctggactttctctttcaggcccttgtgaaaacctcacggctggaaacgggcgtgatccagttggataagaaaccgggtcgcctctttgataccgtggcgcaggccatgagtgggattgtgtatgcagcggagaaaaaggaaatcgctgtgtccgtggactgcccggaggatttgaccgttttccatgacagcaagtggacatccgaagccctctttaacctgctggacaatgcagtgaagtacaccccggcaggcgggaaaatcgccgtgtcagtggtgctgtgggaaatgtatgtggaggtcaaagtgaccgacaccggcaagggcatttccgaaagcaatcaggctgccatcttccgacgcttctatcgtgaggaagaagtacacgaacagcagggcgtgggcattggcctgtatctggcccgcgagatcgtaacgcggcaaggcggctatatcaaagtggtttcggagccgggcaagggttcagaattttccattatgctgccgacaaaatagaatgcggcggacggtcattctcggctgcccgccgtaagtcttttcgcaacagtgtgccgataaagctgccagtggcagtttttcggcggaaatgtccgagcgttgtaacatttcacccccgattttcaatgaaattttttggccgctgtaacatttcgcggacatttgggttttacaatagccttatcaacaggcagaaagccttgaaaggagttttgagtatgagaattttacagactatcgacctgaaaaagtattacggtacagagccgaatatcacccgcgcccttgacggcgtgaacttctctgtaaatgacggcgaatttgtggccgttgtgggaacctccggcagcggcaagtccaccctgcttcacatgatgggcgggctggacacccctacttccggcaatgtgattgtccgggacaaagagctgtcgaaaatgaacgacgaacagcttaccatcttccgccgccgcaacatcggctttatcttccagaactataaccttgttcccatcctgaatgtgtatgagaacatcgtcctgccggtggagctggacggggacacggtggatcagaaatttttggacgagatcgtacacctgctgggactggaagataaactgaaaaatatgccgaataatctttctggcggacagcagcagcgtgtggcgattgcccgcgctctgattaccaaaccggctattgtgctggccgatgagccaaccggtaaccttgacagcaagaccagcgccgaggtgctggggcttatcaagcgcaccagtgcagagttccggcaaactgttgtgatgattacgcacaatgacgacattgcccgtcttgcagatcggattgtccgcattgaggacggcaagattgtggagtaaggaggtggcaggctatgacatggccttttgagaatgataccagcgccattacaaagaagctggcaaagcgcagtttgcatcgtgaacggcagcgtaatttatttgcaatcattgctcttgtgctaactgcatttatgataactgcgacattcagtattggttttagttactttgaaacctaccaaatgcaacaaattcggttaatgggaactaccgctgatgtcggaatcacaaatgtaacagaaaatcagttggttgaaatttcaaaatcaaaccttgtccttgacgtaggtatacagcagcgtttaggcagtgttgatacagagcaactgcaaaatgcgagattaggtatagtttggatagatgataccgagtgggaacaccaccgtcttcctactatatcaggtgttgtaggaaattacccatcaagtaaaaacgaaattatgctacctacatgggtgcttgaacagatgggcatttctgatccgcaaatagggatggagattgtgttgtcataccaaattggcgatagctatgattatgtcacggacacctttttgctgtcgggctactatacggactacattccaatgcgcacaaataatcgtggttatgtttatgtttcatccgcttttaaggatagcttaaatgtatcactggataatagtgttacggcaatgatccgttttcaaggcaatgataatgctgacaaaaactgtgaaagattgcggcgtgagattgactttacagaagggcaaacatttgaaattgtaccattagaacaggcaaatggtggaactattattttagctgtaataattttagcagtttttatatcctttagcggctatttgctgatttataatattctttatgtctctgtcataaaagatgtgcaattctatggccgtcttaaaacgattggaacgactcaaaggcagataaagagaattatctataagcaggcaatcagaatctcttgtattggtattccgattggtctgttacttggtgcggttgtttcctttggcattgttccttacttcctgaatatgatgtattcaacaaattctgatgtgggaacaaaagtatctttttcgccgtttattttcataggagcggccatatttacgttcattaccgttatgattgcaagcatgaagcccgccaaaattgccggaagtgtttcaccaatagcagcactccaatatacagcagccagcacaaagagcagcgccagaaattgtagcaaaatgaagttgtccagaatggcatggaacaatgtctttcgtaatgctaagagtacaacccttgtttttgcatcgctttttttcggcctttccttgttccttgtcgtcacagggctattacatggtttaagcccggagaattatgtgagccaatggggagtaagcgattttgcactcacatatagtatccacgaaagagaagatttaatttccagcgaaatggtttcagagattggtcagcttgacggcattgagaatttgaggttgacctatgcaccttatcctcaagtagcagtagatgttgtatatgacgatgctgtatttcacgagtttcttgagtcattagacggagtaaacggcattgatttttctgatccggcaaaattagaaaattatcagcaaaacttttttagcggggtttttggaattgacagtgcatatttggaagaaatcaataaaaccttaaacttgcctattgacacgtctgcctttgaacaaggaaaggttgtgctgctgtccaaaacagtagaagaccttattcagccggggcaggaaataacaatccagacgcagaacggacagcattcctttattgtagcgaacggttatttgaatgaagggtttcgagcaggaggaggcaatgagagagggacggctcctgatttgtatattagtcaaacagctttgaaagaactctttccgcaatatagagtgttccgcgtggcctttgatacggatggtcaacatgacgaaagtatactgcaagaattaaagcaaatcaccgcatcacaagctaacattgatattatatcccgatatgaacggcgagaagaaatgcaggaatatctcattacagcaaaggttttaggaacagggttgtccgtgatcctgctgcttgttggtgtcatgaactttgtcaatacaatggttgtcaatgtaaatactcggcgctatgaattagctgttcttgaaagcattggaatgacaaagcgacaaatcaaacgaatgctatttatggaaggtttctattattggggcgtttccctttcccttgcagtcaccattggaacagcaatcttcatcttgctatatatgatttttagtaaagtggcctattatgctgttttctcttatccatttatcccgctggtgctggtgtctggactggtgttgctaatctgccttattgtgcctatatgggtctacaaaactgacgttaaccttccagttgtggagcgattgcggttgacagagtgagtttaatcaaatagcaaaacatccttagatcaatcatatcgaagcggagcagattttagctgctccgcttctttagtatttttcaaaaaattcttttgaaatgtccgagctttgtaacaattcagcctgtttttctgtcgaaatcaaaggcacctcggacatttatagttcttccaaaagtttgatgataatattaccattcatggaagaagcaatctgttattgcaataatgcgaaattgacgatagaaagtttttcatatctcggtcagctcaacaattacattactctgctgatacagccagtccgtaaattctttcgggctggccgttcctgtttttacagccttttttctctgtaaggcttctttcttaaagtcggaaaaggaagcctgtattttttccagacggtcagccggaaagcctgcggtattttttacccggtttattttgttgcgccagttctggcattcatttttataaagcaggtcatagttattttctcttgacctctcgtcaaattcccgcttgttttgaagcgcctgtgcttttcggcacttgtcgctgcacagctcataccgctggctctttgccagaaaatattttccacagaccttgcaccgccggaagcaaagcccccagtcattcagcctgttcagataataggtaatcaacgggtagagggacgcataggcagacacacattcttctgtgcgccggttgtccgggaaccagaggtcaagccgggtatcttctgacggtgcgcctttgaaataaaggctgccagcttgaaattgtttcggttttcctgtctccctgtcaaagctcatggtttcgttttggaataccccggtcagtctgctcattttatccatgaagcggtcacaggcagcgttacggtcacggggttctctggcaagcagatagctgttccagatacggaacgccacatacattttcagagggtcgttgctaagatatttctcccaaagaaattcgcttgccgcctgctccagctccggctgtttccatcggttggagtggagagcttgccgcagcggagaaagcccgtataagttccagtctctgtccgtgtcacgctcaaagtttatcaaaaaagttcccagtgggcgtgtcatatcacaaagcacctctgcgttttggctcccgttcagacggaagcggatctgctgttcttccccaatcaaaatccgctctttcattttcttcctgtccagcgtcaggacaaacaaaatcctctcaaaacatggctcatgccgtataaactgattctccatccctatcccctgcctttgtttatggtaattatataattcagttatatccgttacactcatggtatcgcagaatcattgttttgtcaaggatagtacgctatgatgattgcggttggtaatttcgtaccgcacagtaccttgacaagtgaatgaccgtccaaaagggatatgaccggcaggagaagtgacgcattcggcgcaccaatgcagggaaacaccgcaggaatggggcaggaaaacggcttttggggagaacggcaacaggaagcattttaacctatttgatttatgggaggaacagaatgaacgataaaaagagattgaacagctacgaggatttaccgctggttctggatgtggcggacattcagcggattatgggaatttcaagagcgagcgcctatgagctggtacacacacccggctttccagcgttccgcaggggcagacttatcaaggtcagcaaaattgctttctttgaatggatggcaaaaggctccgaaaccataccgggaagtgacaaataagcgtgaggtatcattccctgacttgcaatactgccgcactttccaaagggcatacagagggaaaaaaccttaaaaatgataccgaaacgctacaccaaaacagcctatctgcgtacatcagatagaaacggagaaaggagccggttatggcaagaatgagtaacaggcggcggttggaatggtctttcttcttaaatgaccgcagccgtatcacttacaacgaactgtgccggaaatgccagcacgaatgtaaacagagcttccgggcggttgtggttgactgcccgaagtatctttccaagcgttccaagaaaaaggacaagactgccggaaacggcaaaatcccttaggaactaagggcgcacttctatacatagtctaaagaccatgtatcgtgcgtcctgcggagcttacctctgccgctgataaaatcagcaatccgaggtctgcgttcgctttgctccgacaaggtggctacacccccttgcgccgctaaagcggctatcccctgtgtacccgccgcaaagagaaatccgctctgtggttttcccttttcatcgggctttatagaagcactgacacagactgtctgcggatggtctttctttatcttataagcaaaggatgtgagaacatggaaaaatctttggaacagttaaagcaggaatatgaaaaaaccactgtcctgctggaacgggaaaaacggaaaatgcagcgtttgaaaaaccggcaggcgtatctggaaagcggttcccggaaacagaggacgcaccggctgattacccgtggggcagccgttgagagcattgtgccacagacaaaggagctgaccgaaacggaattttattccctcatggaaagcattttgaatctgccgcaggcggagcctttcatccggtctgccgcagaaaaccacgcccgtatttccgggcaggagaaaggcggtgactaaggatagcactttatcatttttcaatcgcacagatcaagcgcagcgccggtcagagcgccattgccagcgcagcctaccgagccggggagcgtctttacagcagctactatggagaagtcagcgactacaccaaaaagggcggcgtgatcgcttcggaaatcatgctgccgccccatgcgccggaaatatatcttgaccgggcgaccctctggaatgctgtggagaactgcgagaaacatccaaaagcacagcttgcctattcctttgatattgccatgcagaatgaattgacgctggaagaaaacatggagctggcgaggaagttcgtacaggagcagtttgtgacaaaaggcatgattgccgaccttgcttttcacagcccggagaaagaggacggcggcatccctaacccgcattttcatgtgatgacaaccatgcgccctttgaacccggatggcacatggggacaaaaacagcgtcgggaatatcttcttgatgaagatggaaaccgaatccgggataaaaacggcgattatatgtttaacgctgtccatacaacagactggcatgagccggaaacgctggaacactggcgggagcagtgggcggctgccgttaatacaaaatttgaggaaaaagggctggatgtgcgtatcgaccaccgttcctatgtgcggcaggggcttgacctgatacctactgtccacgagggagctaatgtccggcagatggaagcaaagggcatccgcaccgagaaaggggaactgaaccgctggattaaagccaccaaccggctcatgcaggatgtgaggaagaagatcaaagccctgtttgtctggatggcagaggtaaaagaagaactttccaaaccgcagacaccgagccttgccgacctgttgatcgcttattacaaccagcgcaacgcaggggcatggagcaataaagccagaaccggaaacttaaagcagtttgccgaagccgtcaattatctgacggaaaacaagctgctcacattagaggatttgcaggagcgtctttcctctgtcagtgaagaatttgaagcattaagcggctccatgaaaaagaaatctgcccggataaaggaattgcaggaattgatacgggagggcgagaattaccagcggctaaaacctgttcatacggaattgaacaatatcaagtttaagaaacagagggagaaatttgaaacatcccacgatgcggagttacggctgttttatgccgcccgccgtattctgaaagaaaaactggacggaaaacccattgccctgaaagcatggaaacaggaatacgcacagttaaaaacagagtatgccgaactgcctccgcagcacaagctgctccgggaggaagtcatacggctgcggcaggtgcagaacgccgtagataccgcactgcgccggagagagcagccacaggaagtacagagaaagaaacacgagatggagctatgacataaccggcagctttaccgctaccggcatttttatggagggagcatttgaatgtatttgaagcggtgaaacagtctgttaccacccggcaggctgcttcattctatggaatccgggtgggaagaaacggcatggtctgctgtccattccacaatgaccgcacgcccagcatgaaagtggacagccgcttttactgcttcggctgcggggcttccggggatgtgatcgactttgccgctttgctgcatggattggggaaacgggaagctgcggtcaggcttgcggaggacttcggcgtttcctatgagaaatccggcaatgcgccgccagataggaagcgtcacaacaggtcacagccccgacaaaaatcagcggagcagagatttcaggaaacggaacggtattgtttccgggtgctatgcgattatctgcgcctgctggagcattggaaaacagcatacgccccacagccgcaggatgccatctggcatcctctttttgtggaagcgttgcagaggataagctacacagaataccttttggatattttgttatacgaagaaatagaagaaaaagcggcattgatcgccgcacagggaaaggaggtgctgcggcttgaacagcgaatttcagagcttgccgccggaaactcaggaagcggccaaaaggacgatggatacaatggaaccggcgcagacaccggcagaaatccgggagacgttagaggggacgcagaaaggcggcgtgaagaacagcatccgaaactgcctgacggtgttccagcgtgacccgctgtttcgtggggcgctgcgcctgaaccttttgacggagcagattgacattgtgaagccgctgggatgggagcgcaccagtaccacgctgaccgacatggacatgaactacctgcttttgtatctggaagaaaactacgggcttaccagcgagaaaaaggtgcagagcgccatcaagattgttgccaatgaaaaccgctaccatccggtcagggattacctgaacagcctgcaatgggacggcacagagcgcatccgttacgccctgcatcactttctgggagccgatacggacgaatacacctatgaagccttgaaactgttcctaatgggagccatccggcgggtattcagaccggggagcaagtttgaggtcatgctctgtctggttggtggtcagggagccgggaaatctacctttttccggctgctggcaggcagggacgaatggttttcagacgatttgaagaagctggacgatgaaaatgtgtaccgcaagctgcaagggcattggattatcgagatgtcggagatgattgccacagccaacgccaagagtattgaggaaatcaagtcattcttaagccgccagaaagaaacctacaaagtaccgtatgagacacatccggcagaccggctgcggcaatgtgtatttggagggacgaccaaccggcaggactttttgccccgtgaccgcaccggcaaccggcgctttctccccgtgacggtgtacccggaacgggcggaggttcacatactggacgatgaagcggcggcgagggcgtatatcgaacagatgtgggcggaagccatgacggtttatcgcagtgggaagtataagctgtcattcagcatggaaatgaaccgatacctgaacgcccaccagcaggactttatgcaggaagacacacaggccggcatgatctacgcctatttggaggactacaccggcgacagggtatgttccaagcagctttatgaggaagcgctggggaacttaaattccccggcagactgggagacacgggcaatctgcgagattatgaataccggcattgcgggcggcatcatacagggctgggtagcctacaaaagcccgaagcggtataagaaatacggttctcaaaaaggctgggagcgtgtcaaccaagctccgccggagggggacggttttcaggaaatcacggaagaagaagcccggcaaatggaacttccattctgaaaagccaccggttgacagtttggttgacgctttggttgacagccggttgacggggaaaagcctgatatttggggcatttctctcctttgtcaaccatgtcaaccaagaaatcaaagaaaaagtaaaaagtaataatagagcgcctatggattgttttcaaagtcttttctgccggttgacacggtttggttgacacggagacagtctgcggctgtacacctgtctgacattcccttgtcgggcatatttcatttatggaggtaactgcctatggcaaaaagcaaaaacgagagcaataacaaaaacagcggcaccctgcttaccgaaaaagacggcacccagtattttgtcatggggaaagtccgtatcaaggtatcggagcatttcgcacaggatgggaagccgcttgacagcctgctggaagatgtgatccagcacgctgccgccgcttcctgaaaaaatacggaataacgactgtcaatcagcccacgcttatgatatacttgtaccagcgagtattgtataagcgtgggttgtttcttttagaaggaggatttttaaccgtgaaacaaccatacaatacaacgatttataacactgcactatatttgagattgagccgtgacgatgaattacagggggaaagcggcagtatccagacccagcgcatgatgcttagacagtatgccgcagagcatgggctgaccgttgtagacgagtacattgacgacggatggagtgggacaaatttcgagcgtccaagtttccaaaggatgattgatgacatcgaagacgggaaaatcaactgcgttgtcacaaaggacttatcccgtctgggaagaaactatatcctgaccggtcagtacacggaaatctatttccccagcaagggagtacgctacattgccatcaatgacaatgtggacaccatcaacggagaaagcgagcttgcaccgttcttaaacatcctgaatgaaatgcacgcccgacagaccagcaaaaaggtcaaggctgccatgcacacaagatttgccaatggcgcacactatggagcctatgcaccgctgggctatgtaaaagacccggacaaaaaaggtcatcttctgatcgacccggaaacacgctggattgtagagaagatttttgaccttgctgtacacgggcgtggagccgccagcattacacggattctggtggaggaaaaagtgcctacccccggctggctgaactatgaaagatacgggactttcgccaatatctacgccggtgcgcccgcagaaaaagcctatgcgtggacgatagcacaggtcaagagcattttgaaagaggaaacctacatcggtcacagcattcacaacaagcagagcaacatttcattcaagaacaagaaaaaggtgcggaagccgcaggaagaatggtatcgtgtggaaaatacccacgaagccatcatttctgaagaagtgttccaaaaagttcaggagctgattgcaagcagacgcaggaaacgcagaaacggtacgacacagattttcgcaggattgataaaatgtgcagactgcggatggtctttagcctatggggaaaacaagcagaataagaacccatacgggtactaccattgcagcaagaacgggcagggattacgccagtgttccatgcactatatccgctatgatgtactgtatgcctatgtgcttgcaagactgcaatactggtctatgctggcacagaaagacgaggacaagctgctgaaacgcctgctcaatgccagcgacagggaaagaaactctgcgaagaaaaagcaggctgcggagctgaaaaaggcagagaagcgtaaagccgaggttgacgggctgtttgctaaaatgtatgaggactggtctgccggacgcataaccgagtataacttcaatatgctgtccgagaagtaccagaacgagcaaaaggagcttgaaacaaaaataagacagcttcacgaaacgatggaagccgccgtacagaccgcagcggatgctgaaaagtggattgccctgatgaaacagtatgtcaaccctgtggagctgaccgccgaacttctgaacactctaattgaaaaaataaccgtccacgaagctgtcaagggcgaggacggaagccgtgagcaggaagtagaaatctactaccgcttcatcggcaaaatcgactgacctttcttttttacccaacaatatctttaattaagggagacgggcatttgcttacctgatgtgtcggtttatatggaactatgtgagatattgggaatcagcataaatgaatttcttgcaggggaggatattgacgcagaaaatgtagaaaaaaagtcagaagacaatattatacaagttacgaaagacagtaaaaagaaacagaaaaatttaaagagcattttagcagtggtaacgacatttgcagtgatcatggttctggttttaggagtagttttcgttcataaggtgatgcagccgaagaattatattacagcagttgaccggacaagtgcagaaatgaaaaccgcagaattattgtcgggagcagatggggcatatctttttaatttttatgcaaaagaagagtataagacattgacaatttatttgtcagagtatcaggcgggagaattgattaataaaagtaaagtggcagatttggactatgatgggctcgaatcggctaaaagaggtgtgattgctgtgataccggattttgaattgtttcgagtgaaattgatcatagcagacgattattctaaatgttctacagattttccgattctggaaaatgtagaaaacagagaatattatgggagaagtgcgacacaagtggaaggtgaagttccgattcagcgggatacagaacagggtctgatggcattgatttacggagaagatggattggaagcaattccggtaaaagaaatggagcagggaaattttagggagaagaatgattatgtctattatctgtccttccggtttggaaaataattacgtaaatgaaaatatgagaggtaagatgagatgaaaacaagagaagaagctgctgcctatggattaactttcccgaacagctatgaagacaggccttttaaagaccaacgatggcaggtgatccgtgtaaagccggggaaaaagatatttttgtggatttacgaaaaagacgaattgatccatttgaatgtaaagacggattcgagatggagggatttctggcgtgcagcgtatccatcggtaattcctggatatcatcagaataaagagcattggaacacaattattctggatggatctgttccagacaaggatattgaacggatgattggtgagagctatgatcttgtgacagacagtcctacaaaaagaatttatgaagctgtaaaacggattccaaaagggcatgtggcaacttatagacaggttgcgaagatggcaggaaatgaaaagatgtcaagagcagttggaaatgcgcttcataagaatccagatccagatcacattccatgtttccgtgttgtgaatgcgaaaggtgagcttgccggagcatttgcatttggaggagcagatgtacaggcagaacttttgagagaagacggtgtggaagtagtagatggaaaggttgatctaacaaagtatcagatggcggatctgatggaagagtaagatagtactgtttcttttgggaaagatagtgtataatacttacgagtgattgctgttcgcaaagtactgcgaacagcatctttgtatagtgcaaagagcaggaaagaatacatcattatggttttgcttttgaagggaaaaaagtgttgatcggataagaaatggagaaatgaatgaaaattaagaaagtggcagtcctcggtgccggagcagtaggctcttatgtgatctggggattatcgagcagaaatgatatagagcttggagtgatcgcagaaggagaacgagcagagagactgaaacagaagggatgcacaattaacggaaaaatataccatcccgaagtatggaaccccggagaaacagacgctgtcgatttaatgattgttgcattgaagtatggctcactttcggcggcattggaaagtattcagaaagcaaccacggagaatactgtaattatgagtctgatgaacggggtagacagtgaagagattattgcagaaaaagtaggagtggagcatcttcttccggcagtgatcaaggtcgcttcacataaggaagaagatggctatcattttgatcctgagacaacaatcggaattatttttggcgaacgtactgcaccttacgatagtgatcgcatcagggcaattgaagaactgttcaaggataccggaatccatttccgggtgacagagtatgcaagagaagagatgtggagcaagtttcggctgaatgtctgtaacaatctgccacaggcaattctcggtgcgggagttggatgttaccgtgacagtgtgcatatgaaggcaatcagtgatggactgaaaggagaactggaagcaattgcacaggcgaaaggaattgatctgagtaagactgaggcgtcttccgggcgtggaagtgcagtaccgccatctgcgcgttattctactttgcaggatttggatgcaggaagacacacagagattgatatgttttcaggtgcactgatccgtatgggaaaggaacttggaattccgacaccgtataatgagtatacatatcatatgattaaagcactagaagagaaaaatgacggacggtttaattatacaggagatgaagaaccgacctggtcaaaataaaacagggaacaatttgtggcagaggcaggttatgaaaaaatattgaaacagtgatgttgaaacaacataaaaaggtgaggtaaattaagatgaaagaattatacgaagcaatcgaagcaaaaattaaagcaagcggttatccgagagcaatctccggagaagatgtatacaacgacatctgtgaccagattgacggaaaagagaatggaagttatgtattgttatccaagttcgaagatgatgtgatttttgagtatcatatcacgattcaggatgaagatttcaacctggggattttgacaatgcgaacaccggaaggcgtgtttgagacagattttgatgcggaataaaaggatgaatatgttatgaagaaaatcagcagagtttcaactataattagcgcaatcatgctacttacttacattattgttcttatcagcatctggagcaggattcctgatacagtaccgacacattttaatgcagcaggagtggcagatagttatggaagcaaaagaaaccttgtatttgaaccagttcttgccgcgtttctgttgttattcctctcattgatggaaagaattccggcaatctggaatttcccggtggttgttacagaagagaacagagaaagattgtataagattgccatgataatgatgggcgggattaaggttctggttactgccctgctgattgatgttggagtcagtagtcttgtggaaggatatccaatctggccgatgtatatgatgcttggagtgatgataatattgattatcgtatcgactgtgcagatggttcgggcgaaataatgtggaataagaaaacaaataaaaaccctcttgtgcaatatgtttatccaaaatcttaaaaaaatataaaatttatataaaatccttcttgaatttagcatgatgaagtgctaaactcttaacataaaaacagagcgcgatctatttattgacgagagcatctggattatagttaagaaagaaggaaagaaaatgaacggagttataatgatggtcattgccatcgttgtattaggtggaggatatcttttctatggaagatatcttgagaagaaatggaggattgacccgaatgcaaagactcctgcttatgaactggaagacggcgtagattatgtgccggcagatacgaatatcgtatttggtcatcagttcgcatctatcgcaggagcaggcccgatcaacggaccaatccaggcagcaatctttggatggcttccggtacttttgtggattctgatcggaggtgttttcttcggagcagtgcaggattttgcatccatgtatgcttctgtaaagaacaaaggacgtacaatcggttatattatcgaagagtatatcggtaaacttggaaagaaattattcctgttattctgctggttattctgtattcttgttgttgctgcatttgcggatgtagttgcaggaacattcaacggattcgtagctgatgacgcaggaactataagtaaagtagcagcaaatggtgctgtggcaacaacatccatgcttttcattgtagaagccgtagcacttggctgcattttgaaatatgcaaaactgaataaatgggttaacacagctattgcaattgttatgcttgtcgcagcagtagcacttggactttattttccaatgtatctgacaagagagacatggcatatcctgatctttatttatattctgattgccagtgtcgcaccggtaacaatgctgcttcagccacgtgattacctgaacagttacttgctgatctttatgattgcagcagcaattgtcggagtatttgtagcaaatccatcctgtaacctgaaagcttttacaagcttcaatgtagatggaagttatatgttcccaattctgtttgtaacaattgcatgtggagctgtatcaggattccattcactggtatcttccggaactgcttctaagcagattaagagtgagaagaacatgctccctgtatcttacggagcaatgatcatggaaagtatgcttgctgtaatcgcactgatcgcagttgcttccttcgctgatggtgaggcagcagcacagggactgacaacacagccacagatttttgcaggagcaatcgcaaacttccttgaagtgatcggattaccgcattctcttgtatttacactgatcaaccttgcagtatcagcatttgcattgacatcacttgattccgttgcacgtgtcggaagactttctttccaggaattctttatcgatgatgacacagatatggataatctgccattgtacaagaaagtagcaaccaataaatatttctcaacagttattacattggtacttgcatacttacttgcaaaggttggatatgcagaaatctggccactgtttggatcagcaaaccagcttctgtcagtacttgcactgattgcatgtgcagtattccttaagaagacaaaacgccagggagcaatgctctggattccaatggtctttatgatggcggtaacatttacagcacttggaatgacaatctgtaaactgggaggtcagtttatgacaacaggtctgagccttggaaatacattacagctgatctttgctgttctgcttcttatccttggagtaatcgtagcaattcagggaattaaaaagcttacagagaagaaagaagctcaggcagataaagttgaggagacaaccattctggaataagcagaatagttaataaagagtaagagacaagatcttcatgcagacttaaaatgtctggcatgaagatcttgtctctagttctatttaattgtactcaaatagaaacaggttaaagtatagaaattttacattcgccgggtgtatactaagtcgtaatgtaaaaagacaatctaagtagtaacaagatcagggggagtataaatgaacgcgaacataaatcaacaacatatgttcagcaacaagatgatccgtgctcttttagtaccaatcatactggaacagttattgaattccatcatgggtaccgcggatacgatgatggttagtaatgtgggatcagcggcaatttcagcggtgtcactggtggattccattaacatattagtgatccaggcattttccgcattggcagccggaggtgcgatcgtctgtgcccagtacattggacaggggaataaagaacgggcaaatgagtctgcacgacaggtactatttatcatcactcttatatcagtagctgtcagcgcattttgtcttatttttcagaaactgttacttcatctgatttttggagcagttgaagcagatgttatgagagcatctgaaatctatttcttctacactgcattatcatttccgtttattgcggcgtatgatgcagcggcatcgatcttcagggcacaggagaacacgagagatccgatgcttatctcaatggtatcaaacgtgatgaatattgtcggaaatgcaattatgatctggggcttccatatgggagtcgcgggagctgcactggcaactttgatttcacgtattttctgtgcggttgtagtattggcagagcttcgtctggatcgtcagccaattgtggtacgagattatctgaaaatccgtccagactggagaatgatccgcaggatccttggaatcggaattccatccggtgtggagaacagtatgttccagttaggaaagctggcgattcagtccacagtatcaacacttggaacaacagcaatcgctgcgcaggcaatgacgaacattctggagaatctgaacggaatcggtggtatcggagtcggaatcggattgatgacaattgtaggtcaatgtctgggagctgaccggaaggatgaggcagtttattacatcaaaaagctttgcgtgattgctgagatcgttatggctgcgagttgtgtgattgtttttgcactgacgaaaccaattacgattctcggcggtatggaaccggagagtgcgaagatgtgtttccatatggtaatgtggatcacgattgtaaaaccgcttgtatgggttatgtcatttgttcctgcatatggattgagagcagcaggggatgcaaaattttctatgatcacatcctgttgtacaatgtgggcatgcagattctgcctgtgtgtatttctgatccgtgtaatgggatttggtccgatgggagtatggatcggaatgtttgcggactggacggtcagaagtattattttcacctggcgattccacagcagaaaatggctggagcataaagtaatttaaataagaagagaaatctgaacaaaaagagaaatccaaacaaaaatagaaacagcagggttactgtcgggaaagcattttaataataatgcttttggcagtagccttgctgtttcttatgtctgctattttttaaatttgatctttaatatcctgatagatttatgctttgtgtatgattctcaagaattactcttcaggtgcaagctctgttgtctgcttctttggaggcataaccagtgagaagataaggaatgcaatcaacgcagcaaccagtccaggtacgatcggctgattgaagtgcagaccgaacagatttcctttggaaacatgctccagatatactacaacaatagttccggcgatcagagaagccatggttcctgcctgggaagctcctttccagtaatgtccgagaacatatgggaagaaagaacctgcggcacgaagggtgaaggcaaacatcaggattgtaacaatacttgaagtattaaataatgcaatcagagtagcaaaaacacctacagctgccattgtaacacgagttacgatcatgatttctttatcagatgcgctaggcttaatcacaatcttgtaaatatcatttgcaaagatcgatccggcaccaagaaggtctgagtcagcacttgacattgtggcagatacgatacctgcaaataacaatccgcagataattgccggcattgcttccatagcaagaaccggaagtgcataacgggcaccaacatcctggaagtccgcagcattgaatttgcccatgttgatcagtgcaagtacgatgattcccataagtgtcggaacaaaagcgtagataaagtttacaatcgcagcaaggacagatccctgtcttgctgcttttccgtctcttgcagcgtaatatctggatacagcttcctgtcctacagtaaatgtagcaacatacatgattgttaaactgataacatccattacattataacctttaaacatgtcaaatgtttcagcaggaacattagctacaacattgtcccatccaccggcaagattcattccaaatggaagtgcgatgatcattccaatcacgatcaggaatacctgaacaaagtcagtaagtgtaacactccaaagaccacccatgatcgcataaattgttacaacgacacctacgatcagaacggctgttttataattcagattcagcatagtagacagaataacggatgatgcgataaactgtccggctgtcagtccgatcaatggaacgaacatgatcaaagatgtaatgattcctgaaggttttccataacgacggcggaaatattcaggaacggttttaaccatcgcagcacggaattttggtgcaaggaatgtaaggatcacaaaagcaaatcccattgtgataatgtaccatgcggcactgagtccgtgactttccatgccctgctgaacaacaccgagagaacttcctcctccgatctcagtagcagcaagcgttccggccatcaaaaacggtccgagtcgtcttccggcaacaacgaagtctgtgttggattcaatctttttagatgacagataaccgatcaataacataacaagaagataaacaacaacaacagcggttacgataatgtttgactgcataaaatctccctctttcctttagtaagatttgaaaaaggtatcaggaaatagcgaaacctgacacctatgttcatacgaataattataccataaaaactttcacacacaacctgtaaagagaaaaaacttgttaaaatttatcgatatttccggaagataatcgattggtatagtagatattaacaaaaataataaaaggcgagaggacagcgtgaaaaagatcattttttagggggtggacatttgacgtttctattattacaattataataatcgacagaaaagagggagattgtatatgacacagatagatgcgttaaaaacagatgaaatacagaattatgagatagaacatcaggaagaagtgcgccgtctcgcaggcgagtgtatggtaattttggaaaatgacggagtccttccacttcaggctggtacaaagaagattgcattattcggaacaggagcaagacatacgatcaaaggtggaacaggatccggtgatgtaaatatacgtgaaaacatttcgattgcacaagggcttgagcgtgcaggatttaaatttgtaacagaaggctggctggatcagtatgacagactttatgcggatgcgcaggaagcgtatgcgaaaaagttaaatgaatttacagagaaaacaggaaaaccatcgatgctatatgccttcgagaacccttttgaggaaccggaacagccggagattacagaagtggatgtaaaagaagcggatgcggcaatttatgtaatttctagaaattccggtgagggaaaagaccgcagggcagagaagggagattattatctcagcgacagagaacttcagaatatccgttttatgacagaacactataagaactgtattgttcttttgaatgtaggtggagtcattgatctgacttcattgaaggcaattgaaggtgtacaggcaattatgcttgtgggacagacaggaaatatgggaggttatgcagttgctgatgtgctgactgccaagacgattccttcaggaaagctgactgatacatgggcaagatcttatgaggattatccgtcatctgcaacatttagccacagggatggaaatcttgacgacgaatattacagtgatggaatctatgtaggatatcgttattttgatacgtttggtgtgatgcctctatattgctttggatatggaaaaagctatacagaatttgaaataaaaacaatgaatgtaacagcagatgaaaagcaggtacaggttgaagttgaggttacgaacattggtgacaaatatcctggaaaagaagttgttcaggtttattattccgcaccggatggaatcatggagaaaccaacacaggaacttgcaggatttgctaagactaaattgcttgcaccgggagaaaaagatgtcgtgacgatcacatttgcaacgacagatatggcatcttttgatgcatatgatgcgacctgggttatggaagaaggggaatacacgatccgcgtaggaaacagttcacgtaatacggaggctgtggcagtcatcgaccttgatgagcaggtgacaacactccaactgaaacgtctgatgcgtgatacaattgcagtcagagagcttcaccatatgattccgattttcgatattgaatttgatttcggtgttccggcgattccatttagaattatgcttcaggcagagaactttaagaaagaacttgtagaatatgaagtgatgcgcaggacacttatggataagaggaaagatgaagttctgacgctggaagatgtaaaagcaggcaacgcgactctggatgaactgacagcgcagcttaccgtggaagaaatggcagaactttgtgttggaacagagagaaaaaatggcgacggaaatgtaattggttcagcatcctcctgtgtgccgggtgcagcaggagacaccacttccagtttacttgaaacacgaaaagtgccgaatcttattcaggcagatggaccggcagggcttcgtttagagacaccttgtactgccattccaatcgcaacaacactggcacaatcctgggatatggatctgattcatagaatgggagagcttgtcggagaagagatgaagcagttacatgtagatctatggctcgcacctggcatgaatattcatcgtaatccgctttgtggacgaaacttcgaatactattctgaggatccggtattgacaggtctttgtgctgcaacagagacgaaaggtgttcagtctcaaaaaggaaagggaacaacaatcaaacattttgcaggaaataatcaggaagacaaccgtatgtttacgaatgcacatatcagtgagcgcgcgctgagggaaatctatctgaaaggatttgagattgcggtaaagacagctcagccatatgcaatcatgacttcctacaatctgatcaacggagttcattcagcaaacaactatgatatgctgcagaatattgcacgtgatgagtggggatttgaaggtcttgtgatgacagactggtatacttcacaggatacaacagagatgggaatggtatcaccatccggaaaatatagtcattctagcagcgtgcagtgcattaaagcaggaaatgaccttcagatgccgggatgtcagcagaatgtggatgatatcgtagaagcagtgaacgaaggaaaagaaattaccaaagcagatttacaacgctgtgcgaaacatattttaagtgttgcacttaagacaatgtaaaaccaccttggtaatgtggggaatgagagtctttttcgtattactcaaaaattaataaacaatattgtataagatcaagccttttgtgtcgcaggatgcagaaggcttttcctttccgtccaggatcgcattgatacattcgacgggtcttttccctatgccgatatccaaaagcgttcccagaataaatggagccatctgatagagaaaatcattggctgtcatacgaatataaagcgtagactcttctgtgacaaaagtaattatttttatttctttttcggttcctttcttttttcgaatcgaagagaaatgtttaaaatcatgctttccaagtaatgagtgggcagcggtttccataagaagaatatttggaagttctgctgtttgttcaggtgacagatcaaataatgaatctgataacagatcagttaatcgaccgcgataatttttgtggaacaggtcatagatcggtgataaatccatggcatattcataagtgatctcgcgtgcatttaagtctgctcgaaagcgttcgggtgttgatactgcatctaaaacggcaatatcctgtggaagatactggttcagaacagttttaaattctgcaggagtcagttggctttccgtaagaaaattgactgtgagattccgagcatgaactcccggttctgttcggactccggaaaataaagtgacaggagttcctgttactttttctaatacattttcaattttataagatactgtgcgatcattgtggtctttttccgggcgtttccaaccaagataacgtgtaccgtcatattggagtgttaatttaatattctgcatatatcgttctccatttataaataatgtctgtttccagacaagtcatcctttgtattttaactgatgcagatggaaatgtatagagaaaagaagagaaataagactgcaaaggcgaagagagtgattctgattttatttaaaatgtttccgaaagatatttttggtcatttccatcatgcggtcaatttgattttgttcttctttgcttttaccttcttttaatacttcaagaattaatgaaacttcatccggattgaaacgaagtccctgtcggtttgcatttgtgataagtgcgagcatgaccggggcaagttcatttccggattttcctttcgtctgtttcgcggctgtcctgatcagttccagcttgagcggatcgatcgttttcattgcaggatggttcatccagttttccattgttaagatctcctttcggtgagttattgtttatagtgtcttctggctcttcatcagaaggtggagcagatgaaaagaattgtgtaaacatatctgccatagacatcatttcttttatgtttttgaaagtagaaaagagctgtttttcttctgatgtgagataaggtgacagatggtcaaaaatagaatctgcgttgtcttgaaaaagattttctattcctcgtccagaagaaaagtcacaggcagaaagtgcatcataactgacaggagcctgctggtgaagaacattttgcagttcgatgaatttaatgaagacggcaagcatgctctgtgtagctggcgggaaaagaggaaggaaaagtttcagcatgcgaagtccggaagcagttgcttcgtcaaagggggtcataggtgtcggtgttttcaaaaaataaaccctcctgactttcagctgaactgatacatatatatgaaatgcagaaaaaatatattcctgttcatgaatatagatgtgtgaaaaatcggatcatgcgtatactgatttaaagaccttttgtaatcaggggcatatcttaataataagaagaggaaaggaaaacgaaaatgtccagaaagttaattattgatgggaatgcagtatatgaaattgatgagaagtgtatgttaaagaaaaagcttggagaactgaaagaaaagaagataacatcagacgagaagagagcggaacagagtgttgttaccggaaaaccgaatcgtttgaaaagataagccagaaggggcatgcggtttttccgcatgccccttctgaagtggaagaaggaacagatatcagcatccgccacagttgcagccattaccgcaaccgccgcatccgaatccattattgccccatccgccgcagcagcaaagaagaaggatgatccaaagacaactgtcattgccgcagccattaccacatccgccacaaccattaccaccccagccaccgcagcagcagaggagaaggatgatccacaggcaggagttattcagtccgcatccatttccgtttccgccacagccgcagctgtttgcacatccgttgtcacaaccgcatccgcagtttgtagctgttaattcactcattattaaatcctccgaaagattttttgatttacaatgttatagtatgcggagaaaaagaaaatgtgagatgagaaattatttgtagtgataaagatgtgaagtggcaaaaattattcgagcagccgggaaaaatctaaaattccccagccggattcagttcccggaatctgcacacaggaagcgtgaagttttaatttaacttctgcattggtgagaaacgggtattttgaaagaagacaggcaattgcaccggaaacaacaggagcagccatggatgttcctgttttggaaagataaggcggagcatttggaaattgagagtaaaaagcattgcagcttacaattcctgtgccgggggcaaaaacatcaggtttgacaatgcaatcatctgtaggaccgcggccggaataattgagaggatgcctttgggtgtggatcagaggaaaagtgtcgggaacaccaacagtgataactttcgggctgcttccgggaactgtgacggaaccgggagcaggtccgtagttgccggcagagacaactacgacgagcccaagatcccagagggattctacagcattcaataaaagaagtttttgatgaatggaaagatccggtcgtgtacctacggaaatgttaatgatccggatatggaattgcgtgtagatatcacggatccattgaattccatttatgacatttttgatagatccgtttccattctgatccaatactttcccaataataagattgcagaagggagcgattccggcataagttccggaagagagaagtccgcttcccgcaagaattccggctacatgggttccgtgtccactattgtcgatgagaggggagaaatgagagaaagaaaaaagaactttttcggaagaaccagtggtactggaaaaatcccggaaagaaaggatacgatctttaaaatcaggatgaggagaaattccggtatcaagaatagcaacagtgacattttgtccgagaaatttgtgttcctttgtgtccggacaccagtagtgaatggattgttttacccatttcatgaaggaaaagcctttgttttttctttattatatgcctgatgctaaattagtgataaagatgtctgcactgagatggcaaactgtaaagaaaaaacacttgacaccatcttgcgtttcgtgtatgatagcagaggtgaagataatgaataagtttttagagcaggcattattgtttgatttctacggggaattgcttacggatcatcaaaaggagatttatgagcagttcgcgctggaagatctttcgctcagtgagattgctgagatgaaggggatcagccgccagggtgtacatgatcttgtgaagcggtgtcagaagacactggaaggatatgagatgaagcttcatcttgtagagaagttcctttccgtgaaggagaaggtcagtaagattgatgatacacttgctgagtgggaatgcgagaagaatgacccggaagagatggtgaagcggatccgtaagattgcggatgcgatcatagaggagttatagaatggcatttgacagcttaagtgaaaaacttcagaatgtatttaagaacctgcgaagcaagggaagactgacagaggatgatgttaaggcagctctgaaggaagttaagatggcgcttcttgaagcagatgttaacttcaaggttgttaagggcttcattaaggatgttcaggagagggctgttggtcaggatgtgatgaacggactgaatccgggacagatggtgatcaagatcgttaatgaagagctggttaagcttatgggatctgagacaacagagatcaagcttcaaccgggcagtgcaatcacagtgatcatgatggcaggtcttcagggagcaggtaagacaacaacaactgcaaagcttgcaggaaagtttaagttaaaaggtaagaaaccacttctggtagcatgtgatgtataccgtccggctgcaattaagcagttggagatcaatgcagagaagcagggtgtagagatgttctccatgggagacaagaacaagccggcggatattgcgaaggcagcagttgagcatgcagcaaagaatggtaacaatattgtgatccttgatactgcaggacgtcttcatgtagatgaagatatgatggcagagcttcaggagatcaaggaagttgtggaagttcatcagaccatcctggttgtcgatgcgatgaccggacaggatgcggtgaatgtagcaagttcctttaacgataagattggaatcgacggtgtgatcgtcacaaagcttgacggagatacacgaggcggtgctgcgctgtctatcaaggcagtgacaggaagaccgatcctttacgtcggtatgggagagaagctttctgatctggagcagttttatccggacagaatggcatcccgaattctgggaatgggagatgtcctttccctgattgagaaggcaggcgctgagcttgatgaagagaaagccaagaagatggctgataagatgaaaaaagctcagtttgactttgaagattatcttgacagtatggaacagatgcgtaagatgggcggtttgtccagtatcatgggaatgctgcctggaatgggtaatctcggaggtaagatgcctgatcttgattccgaagagaatgagaagaagatggctcagatggaagcaatcatctactccatgactttggaagagagaagaaacccggatctgctgaatccatccagaaagcacagaattgccaagggtgcaggtgtggatatcgcagatgtgaaccgtatggtaaaacagttcaacgaatccagaaagatgatgaagaaacttcctggaatgatgggtggcaaaggtggaaaaaggggcaaattcaagcttcccttttgacatataaatgaaacaataacaaaaaattaagaaaaattatgaggtgaaaaaaatggcagtaaagatcagattaaagagaatgggacagaagaaggctcctttttacagaatcgtagtagcagattctagatctccaagagacggaagattcatcgaggaaatcggaacatacgatccgaaccttgagccaagcgcaatcaaagtagacgaggaagcagctaagaaatggctcaacaatggtgctcagccaacagaagttgttggaaagatcttcaaagcagcaggaatcgagaaataatcgaatctgtatgagtaatgtctgtagctgagtgatcagctgcagataaataacgatgtctccgcggagggcgagtatcatgaaagaattagttgaagttattgcaaaggcactggtagatcagccggatgaagtctcagttactgagaaaaaggaaggcagaactattgtactggaacttcatgtagcagatggcgacatgggtaaagtgatcggtaagcagggtcgtattgcaaaagcaatccgttctgttgttaaggcagcagcaacaaaggaagacaagaaagtcgttgtcgatattgtttaagaacagtatcaggacgaaagaaaaaagtaacagagtcattgcttggtaaagcagggcttaaaaaagggacagccttcataaagaagagactgcccctttctttttacgcgagcaacgagtcaaagtccgtgcttgcacgagaccttggcgactgccgcgataacttgagaaactcgcgaagtgtgtttctcatagtttcataagaaaggaatcaggaatggaacaatttcttcaggtgggagtgatttcttccacacatggtctgcgtggtgaagttaaggtattcccgacaacggatgatgctgcgcgttttcagacattgaaaaatgttgtccttgatacaggaagggaaaagttggatcttgagattcagtctgttcgttttttcaagcaatttgtaattgtgaaattcaagggcattgataatatcaatgatattgagaaatataaaggaaaaagtctctttgtaacaagagaaaatgctgtcgaactggaagaggacgagtattatatcggtgatctgatcggtatggaggtctatacagatgacagtgaggaacgctttggagtactcaaagacgtgatggagacaggagcaaacgaagtgtatatcattacttctgagaatcacggagaagtgctgcttcctgcaattcacgagtgcattctggatattgatgtagaagcgaagaagatgaaagtgcatctgatggagggattactgtaatgaatttccatgtattgactttatttccggagatgatcgagcaaggtgtgaatacaagtattacaggccgtgcaatcaacaatggacttctttcgatcaatgcagtgaatatccgtgattatgcatttaataagcataacagtgtggatgattatccatatggcggcggtgcaggcatgttgatgcaggcagaaccggtgtatctggcttatgaggctgtgaaagagcagatcgacaagagaaagcaggagaacatcaagtcggaagaagtcacgtcaacggaaccagcggattgttctgaagtgtgcaacagtgatttgcaggatgaaaattcgaagaagcgtccactgcgtgtagtctatctctctccacagggagatgtatttaaccagaagatggcagaggagatggctcaggaggaagaccttgtgttgctttgcggtcattatgaaggaatcgacgaacgcgttctggaagaaatcgtgacagattatgtttccatcggagattatgtactgaccggaggcgagcttccggcaatggtcatgatcgatacgatctcaagactggttccgggagtgcttcacaatgatgtctcagcagaatttgagtcatttcaggataatcttctggagtatccgcagtattctagaccggaagagtggagagggaagaaagttccgcccatccttctgtccggacatcatgcgaatattgaaaaatggagaagagagcagtcaatccttcgtacaatggagcgacgcccggatcttctcaaggagagcaatctgacggataaagagaagaaatggatccgccaggtgaaacgggaacgcaaagaagcagaaaaaatgaaatagggacttgaaaaaagcccggaaatatggtaaactacaaaagttgtgaaaagaagcgcgatggtcctctggcacaaaagtgaagtgttaagaacgtcaaatattaaggaggtcacacaaaatgaacgaaatcattagaaaaatcgaagcagaacagttaaaggagaacgcacctgaatttcatgttggtgatacagtaaaagtatatgccaagatcaaagagggtaaccgcgaaagaatccaggttttcgaaggaacagtcctgaaaagacagggtggcggagcaagagagactttcacagtaagaaagacatctaacggaatcggtgttgagaagacatggccggtacattctccacatgttgagagagtagaagttgttcgcagaggtaaagtaagaagagcaaaactgaactacttaagacagcgtgttggtaaagctgctaaggtaaaagaattagtaaaatagtaactatgagagggacaattacagaacttgtatattgtcccttttcttatagcttacgcgagcaacgagccaaagtccgtgcttgcacgagaccttggtgactgccgcgataacttgagaaactcgcggagcgtgtttctcatagttgggaaggaaaataaggaacctatggggcagaatctgagttttcgaaagaataacagaagaaagaaaaagaagaagccgcagatgaagaagaaaaaccatctgaaatttacaaaccgaagtaagaaattaaagtttgaaaagaagaattatcatataacaaagaattctttgattcttgcaggagagatactatgtgtttgtctggtggcagtacttttgattgcatttttcgggcatcgtgtaagcaatgcaggagatgccatgagtccgacaattgaaaatggagaggttgttcttgtagatcgtctgatcgtggatatgaagacaccttccagaggaactgtggtggcatttcgaccagacggaaaccgcgaagttcatcttttaattagaaggattgtcggtcttccgcgagagactatccagatcaaggatggaactgtttatattaatgggaaagagcagaagaaacatattcatgtatcagagataaaagatgcggggatagcttctgatgagataaagcttggcaaagacgagtactttgtgctcggagataatgaggagtcaggcgaagacagcagatctgagacggtcggagtggtaaaggcagatgagatctatggaaaggtctggttcaatgtaagctccggggaacatttcggatttgtaaaaagataaaatagaatgaaaaaataacaggaggaatgcaatgcattttcagtggtatcctggccatatgacaaaggccagaagaatgatgcaggagaatattaagctgatcgatctgattattgagttggttgatgcaagagtgccgctcagcagtcgtaatccggacatcgatgagcttggaaagaataaggcgagactgattcttttgaataaggcagatcttgcggaagacagaagaaatgatgagtggatggaatatttcaagaagcagggatattctgtcgtgaaagtgaattctaagaaaggcggcggaatcaagtcgatccagtctgtgatccaggaagcatgtaaggagaagatggaacgtgacagaaagcgtggaatcctgaaccgtccggtacgtgccatggtggtaggaattccgaacgtaggaaaatctacctttatcaatgcgctggcaggaaaagcctgtgcaaaaacaggaaataagcctggagtgacaaagggaaaacagtggatccgtctgaataagaatgtagaacttttggatacaccgggaattctctggccgaagtttgaagaccagacagtaggtttgcgtcttgcgtttatcggttcgattaaagacgagattcttcagacagaagaactggcaagtgagcttgtgaaatttttaaatcagtcatatccgggagttcttgaagagaagtacacgatagaatcttcagaagataattatgaagtgttaagaagaattgcagaaagcagacactgtctggtcagaggaagcgaattagatgtggaaaaagcagcggcaattcttttggatgattttcgtaatggccgccttggaaggcttacactggagcttccagaggagaactaatacggtatgaaagaaattataaaagaactggctggatggcttctgtatattgtgttgatcatcgcttttacctggtgtgtggtcacttttgtaggacagagaacggaagtcagtggttcttctatggaaactacgctgtcagataaggatcagctgatcgttgacaaaatgacttaccgattcagagatccgaaacgatatgacatcgtagtatttccatatcaatatcaggacaatacctattatattaagcggatcatcgggctgccgggagagacagtacagattttatccggaatggtttacattgatgggatgcgtctggatgaacattatgggaatgaaataatggagaatccaggcattgcagaagaaccattgacacttggtgaggatgagtattttgtgcttggagataatcggaataacagcagtgacagcagagcgtcagatgtcggtttgatccatagaaaagatctgatcggaagggcatggattcgcgtgtggccattgagtcaaattggggtgatacatcatgagtaaaagtattagtgagatcaagatagaatttgaacaggcaggagaacaacagtgggaagcactttgtcaggaatacgagacggattccagaacaggtgtaaaaaatctgacagcaagatatcggaagaagcagcaggcacttgttcaggagagagaacgcctcgaggtaatgaaaacattcgagagaaaatatgcggattatagttttatctgtggaattgacgaggcaggaagaggtcctctggcaggaccggtagtagccggtgcagtgattctcccaaaggattgtgagattctctatctgaatgattcaaaaaaactgtctgctgcaaagagagaagagttgtatgatgagattatggagaaagcggttgcagcggcagtaggtatggcaagtccggcgagaatcgatgaaattaatattctacaggcaacttatgaggcaatgcgtgaagcaatttcaaagctggcagtagaaccagggattcttttgaatgatgctgtgacgattccggagatgatcattccgcaggttccgattattaaaggagatgcgaagagtgtgtctattgcagcggcaagtattcttgcaaaagtgacaagggatcggctgatggtagaatatgataaagtgatgccagagtatggatttgcaggccataaaggatatggatccaaagaacatattgaggcaatcaagaaatatggaccgacaccgatacatagaaagacatttatcaagaagtttatttaatgatatcagggttgtataaaagaaagagctgccaatggcagctcttcttaaatccgaaagttcgacggattagaagagggggatcaggtagatgaaggatccgaaaaaagaaaagaataaccgcaagacaggtggaaactatgagcaggcagtaggtttttatctggaacagcatggctatcagatactacagtacaattatcgctgtcgcataggagagattgatattgttgcaaaagagggggagaatctggtattctgtgaagtgaagtacaggacgggtcctggcaaggggagtccgctggaagctgtagatgcaagaaagcagagaaagatatttcaggcagcaatgtattatctgacggaatatcatattagtgatgtcccatgcagatttgatgtgatcggtattgaagggacaaggatccagttggtgaagaatgcattttgcggatagagaagaaaggacagaatatgagtttaggattgatttataagaacgcggcacatatttttgatgaagtagaaaagaaaactccttatctggaatatccattgtttcaggagacgggcattgtaacgagtgctttttctacacgacttggaggagtcagtgagggctattattcttctctgaatctaagctttgatcgtggagatgacccggcaagggtattagagaattttaaaagaatcggagcatcaatgggtgttaatgtcgaagatatggttctgtcgaagcagacacatacaacgaatgtacgtgtagttacagcggaagataagggaaaaggtgttatgcgggaacgcaattatacagatgtggatgggatgatcacgaatgttccgggaatctgtcttgtgacttcctatgcagattgtgtaccactttactttgtagatccggtgaaaaaggcgatcgggctgagtcattccggctggagaggaactgttggaaagattggaaaaaatactgttcagctgatgcaggagaattttggatccaaaccggaagatctgcttgcagcagtaggaccatcagtatgtatggattgctatgaggtcagtgaggatgtaattgagcagtttaaggaagcttttgaaaagaaatactgggaggatcttttctataagaaagagaacgggaaatatcagttgaatttatggaaggcaaatgagctgatcttcctggaaagtggaattctgccggagcatatggcaatcacaaatgtttgtacacattgcaatagtaagatcctatattctcaccggacgatggggaacaacaggggaaatctgtgtgcatttcttgcattaaaataaggaggttaaaagtatgtatctgacaacagtgaaagaacttggaacagcattactgacaaaggggacagcctttgcactggcccaaacagcaacgcagacgaataacagctccgtcaatgatgtgcttgattctgcacaggaagtaacagcaagcacagcagatgaagtgaatcgctttgtacaatattttaatgataatattccgaatctgattgcctttgggttgaaggtgattttcgcgatagtattttacctgatcggatctaaggtgatatctgttatacgtaaagtggtaggcaaatcaatggagagatccaatgcggatgttggagttcgccagtttgttgattctatgttgaaatttgggttatacgcacttctgatctttatgatcgcaacaaaatttggcgtagaatcttcttctgtagcagcgatcatcgcttccgccggtgtggcaattggtctggcattacaagggagtctgtcgaactttgcaggaggtatcttgattcttcttctcagaccatttgcagttggagattatattattgtgaattcagagggaatcgaaggaactgtaaaggtaattcagatcttctatacaaagatgacaacaatcgataataagacgattgttgtgccaaacagtattctgacaagtaacagtctgacaaatgtaacagcaagaccggaacgtcagctggatcttaaagtaggaatttcttatgaatctgatctgaagaaagcaaaagagatcgtagagaatcttctactgaaggatgaagatgttattcaggatgaagagattaaagtgttcgtatcagaacttgcagacagcagtgttgtgatcggacttagagcctgggtgaagacagaagcttactgggcaacgcgctggagaatccttgaggagattaaaatgtcttttgatgaggaaggtattgacatcccatataatcagttgacagttcatatggcaaatcattagttattatttattagaatgataaaagtatgataaaagtctatagaagttgattaaaaaagtggttgaaatttatatccaaacgcgatataataacaaaggtcgtcagaattgacgaccatatgccgaaatagctcagttggtagagcacttcactcgtaatgaaggggtcgtcggttcgagtccgattttcggctgaagagtaaagaccgttgttgatttcagttgtatctggaatcagcagcggttttttatatattaggaaagttctttcctaatatataaaaaacgctccgcttaggatgcgcacttataacaaacttagaacggatacgaaaaagcatcttgacgaagaaaatgaaaatggatacaatattgttacgagtttataaaaaaagatgaaaaattttctctaataaagtaaaaagaaataaaattaattcttttaaaacaagattagacagaagcagagaaatagaaaaaatacagagggtgaaaatatggcatcagtacagacaaaagattacattgtgcagttaattaaagaggagatcctttcaggagttatgaaaccgggagaagagctggcgcaggaagcacttgcagagcgtcttggtgtttcaagaatgccgatccgtgaggcattacagaatcttgttcaggagggatttgcggtacgtcttccaaaccgtcatatccaggcagtagttttgagcgcacagcagattcatgatgtatttcatgtgattgcagcgatggcagcagagaatacgatcttagttgcaaagaaagagcagatgcttcgaaggaaaaatgtggaacaaacgagtcagacagaattcgaagaagatggacagagcaagcttttccttgagcaagagattgagaaaactccaagcgagcagctttttcagatactttccggcatggagaatgcattgagaccagagaagaaggcagagtgggagatggtttatcaggaaagactcatcagtttgtttgagaatccatatctgtcacagcttcaggggaagacgatggatggttatgtagcttatgcaattgagaagatgggagataagcagcagaagttagagcagcttcgccgcatcacagaaggtattgcagagaataatgagcagaagatccgaatgggacttcgagaatactatctttcttatgctgatgcttttgtagaaagatgggagaagaaggcagaagaaacagaaaaataggttgaattgttataggggtgattacatacatatgtaggttgtaatcacccctttttctataaacaaagtcttatctagatttgttagtgagcaattgctatggtagcaaaggcacctcatgttcgtcattttgtacaagctgtgttgaaaaaacactggattatatcgcaaatatgatgataaaatataaatcagatgatgggttagaaaattggaaagggaggacgatggaaaaagcacgacaagtaaaaagagtcctgctgcaggcaattaagatcgcggtgggcagcagtgtagcaatttatctagcgcatatactgggattggagtatgaggcatctgccggaagtatcacactgcttacgttagtaacaacaaaatgggagacggtgaaattatctttttatcgtatggcgacatttgttttggcggtagttctggcggcgttgacatttggacatatgacgagttcctggcttgcgtatggaatctatgtatttctgatcgttgcggtcagtcatagtcttggatggtcggcaacaatttcggtaaatgccgttatcggcacacattttcttatgacaagagattttagtccggagtttattcgcaatgagctgtttttagtaatgattggaatcacaatcgcgattgtactgaatttgttctatgattatgaaggacagagacaggatttgattcgttatatgagggagacagagaatcagctacagattcttttgtgtgaacttgcagcgtatctttataataaagatatggagatcaatgtctgggatcggatcatcgcctttgaagggagaatgcatgaatttatcaaggcagcgtatgattaccaggataatacatttcattcgcatccgggatactatatagattactttgaaatgcgtctggcgcagctgcaggtacttcataacctgcattatgagatcaagaagatccgtaagatgccgaagcaggcacttgtgatcgcagattatatcatgtatatggcagattatgttgttgagatgaatattccagatcagcagatcgagaagttggaagagatttcggaacaaatgaagcaagaagaacttccaaagacgcgtgaagagttcgaaggacgagcacttctgtatcatattttgatggatctggaggaatttcttgtatataagaaacgatttgtgaatggattggatgagaagaagcttcgtatctactggaaacaggagatggagcaaaaagatagtgcaaacgagttgcagaaatgatgaaaagaaacggattaaagtcagaagaaacaaaaacaaagcattttctgattttaatccgtttttattaattataatatgttactgaaagaatcagatttttcccgggaataatgtgccggctcttccgccttttacaatatcataaaggacttccggatgctttccgtttgtaacaattgtgtttgttccctgggaagtggcaagggatgcggcctgaagttttgtacgcattccgcctgttccacgtcgggaacctgcgccaccggctaaagcatagacgctgtcatcaattgtatcaatctgatcgattagctgtgcatttggatacaatcttggatcgtgatcataaaatccatcaatgtcggagaaaatgaccagatgctttgcgcggcagagtactgcaacgacagctgagagcatgtcgttatcaccgaagagacgatcctcggattcgatttctttatagcttacggagtcattttcgtttacaatcgggattacacccatctcgagaagcgcattgaatgtattgatcagattttcctttttttcttcttcttcaatatcatctgcattgagcaggatctgggcaactgtcttgtcatagtcaccgaagaacttgtcatacagatacatcagactacactgtccaactgcagcagcagcctgtttcatacgcatactgtctggtttagcagtcatgttcagtttatttcttccgactgcgatcgctccggaggaaacgagtacaacttcatatcccatgttctggatatcagaaagtacacaggcaagacggtctgttgtacgaagatcgctctttccggcgtcattggtaagtgtagatgttccaacttttactacgattcgattattataaagtcccataatacataactccttgctgaatatcttttaaaataatttccggatgtcagttaacaaccagccttgtctcatcgactgttttatagtatcatacagttatcaattacaaaagcgaatgtttctcatggattacatgacaaaatcaaatataaagtaagtgaagagatttttcgtagcgaaaacagatgggaaaatgtaaagcgaaaggagtgttaaattcatggatggaagtattcagaaatacatggcatttgttaagacagtagagtgtggaagttttacaaaggcagcggaacagttgagttattcccagtccgggatcagccgaatgatcaatgatctggaaaaggaatggaaggtagttctgcttgaacgaagcaagtcaggagtaaagcttacaagcagcgggatgaagttacttccttatgcggaacgggtctgcagagaatacgagaaacttcaattggaagttgatgagcttcaagggttaaagtcaggattgatccgtatcggtacattttccagcgtagcaacacattggctgccgaatattatcaaggaatttcagaaaaattatccaaacattgattacgagatgcttttgggtgattatacggatattgaagaatggatcatggaagggcgaattgactgtggattcacaagattgccggtaagggatgagatggatacaattttcctggagcaggacaggctgcttgtcgtgcttccggaaggacatccgctgacagaacttcagaagattccggtcagtgcgctttgtgaggaaccgtttatgctattggagaaaggtgctaaggcagaagtttctgagatctttgaaagaagtaatttaaagccgaaagtacatttcacaacatgggatgactacgcgatcatggcgatggttgagagtgggcttggaatcagtgttttgccggaactgattttgaaacggattccgtatcgaattgttacacgagaactggaaatcccggcgtatcgtaatataggacttgccatgcgtaacagaaaaggtgcaactccggcggtgaagcggttcctggagtatctgcagtatagataataagaaatgtgaaacttttagttactgttcactcccgtgtcaatcactacgctgattggcacggaggatgcacgttttatcttgaatggcatctcgcccatcgccaaaggcgattttaaatggcgagatgcgttgctggtcacaggtactgtgaacagtaacaacttttatgaagtggcatgttctgaatgataatttgcttgatagaaggaaatatatgagagtataatgttactattatgataaaaagggcttattctatgaccgacattataagagtcatcagcaatcagagaagagcacaaagattgaaagaaggagaaaaagatggcgattaaacatattttatttgacttagacggaacacttttaccgatggtacaggacgaatttgtccgtttttatatgccgcttcttgcaaaggcatatttgaagaaaggcgtggaaatggatccaaaaggattcattggtgcagtatggaaaggctatgaggcgatggtgaaaaatgatggttccaaaacaaaccgagaggcattctggagttatattgatgaattcctgccgctttctgtagaagaatcagaggcaatcgcagatgcattttatgaggatgaattcaatcaggccaagtgtacgacacagccgacaccactttcagatatggttataaaagaggcgaagaagaaaggcattgaagtttatcttgcaacgaacccgatctttccaagatgtgcaacaatgaatcgtatcgactgggcgggactggatccggaagattttaagattattacaacatatgaagatcatgtatattgtaagccaaatccggaatatttccgtcaaattttggaacagtttgagcttgatccgtcagagtgtctgatggttggaaatgacgtggaggaagatcttgcgatccgtgcgcttggagttcctgtatttcttatcacagatacgatggagaataagaaaaaccttccgatcgactccgaatatcagggctcgatggaagagttactggaatttgtaaaagaattgccggaagtgtaagagcgcggtgagaatgtaaaataagaatgaaagataatcgtttaatattgcgaaacaccttgaggaggtattagtaaaaaatctcttcaaggtgttttgtgtttataggaagctgaaaacaagcgtaagaaaggcgcaatagagaaatttgttttacatggatttaacataaatcatatcagaatgtaaagcagcatttgtaaaatagaacggaaaaatggaaaagaatgttgtcagctttgtatttaagatgacaacaaagactcagagagggcattattatatgattaaaatttatgtgatggataccaatgttctgattcagtccccaaatgcgctttttagttttgaggataatctggtcgttctcccgatggttgtattggaagaacttgatcatttgaaaaaagcagatggcgagacaggagccaatgcaagaaaatgtatccgtctgcttgaagaactgcgtcagaaggggaatcttctggagggtgtatcccttgagaatggaggaatctgctgggttgaaaagaattttgtagatgttgaacttccggtagatttatctctggaggtcgcagataacagaatcttaaaggtttgccttggattaaagaaatcaagaaaagaacaggttgttcttgtgacgaaagatatcctgcttcgaattaaagcacaggtgttggatctgtgtgcagaagattttatttccgagcaagtgatagctcatgacagacagtataccggaagatgtgaagtttatgcaccggatgaattgtttaaggattttaagaaaaagggaataccggtggatgaagtttatcaattagatgagaatgagaaagcattttgtcctaatcttttggaaaatcagttcgtgatcattaaatcagatcaggcaagaaagaagacacatcttggaagagtggagcatggaatccttcggaaactggaatttaaaaagagttctccgtatggaatttctccaagaaatgcaggacagtatttcttacaggaagctttgatgcagccagcagagaaagcaccgcttgttattgtcaaaggaatggccggaacaagcaagacattttattctcttgcagtaggtctggaaaaattgatgaatcatccgacaggcgaatacagaaagattcttgtctgtagaccgaatgcgcagtttgacgaaggaatcggattccttccgggagatgaacaggaaaagatttctccgttgatgcgcccggtccttgataacctggagcagttgcttgattcgaatgaggacgagcgttataaagacgaagaggtattgcgggataaagtggaggaaatttattccagaggtttcattcaggcagaggcactgaattttatccgtggccggtcgatcgtcaagacgtatctgatcattgatgaagcgcagaatacaacgccggatcagatcaaaggcattatcacaagagcaggaaaggatacgaagatcattcttttaggagatccgaatcagatagaccgtccgttcctggatgagagaaccaatggtctgagttatgcggcagaacatatgaaaggaagtccattgtgctggcaactgacgatgacagcagaagaatgcgaacgttcagaacttgcaatggaggcagtaaaaagactttgaaaacaacatataaagagattcgggagatagaagaaataaatctgttgatcgaacagggaaatgctactttaaaagagcttggatatacagaacattccaaaaaacatgccgcaaaagtatcagatactgcaggcaagattctgacagagctcggatatggaaaacataagattgaacttgcaagaatcgcaggttatatgcatgacatcggaaatagtattaacaggcatgatcatgcacacagcggtgcactgctggcatatcagatattaaaggatacagagatgtcattgaaagatgttctggtaattatgacagcaatcggtcaccatgacgaggcaaccggagatgctgtggatccggtatcagctgcactgatactggcagataagacagatgtaagacgaaaccgtgtacagaatccggttccggcaacatttgacatacatgacagggtaaattatgcagccctgtcaacgaagttgacaattcaaaaagagaagaaagtaattcagatggaactggagctagatgatgaaatctgcaccgttatggattattttgaaatctttctggagcgtatgatcatgtgcagaagagcggcagaacgccttgactgtaaatttaagctaattgcaaatggcaacaaaatgtgttaaaggatggagaaaattaaaatgagtaatgtatacatgaaccgtgaattatcctggttgaagttcaatgaaagagtattggaggaagcagaaaacccggaagtaccgctgtgcgagcgtatgacatttgtgtcaatctatcagagtaatctggatgaattcttccgtgtgcgtgtcggatcacttcaggatcagatgctgatcagtacagagatcagagagaataagacaaagatgacttcagcagaacagatccgtgcaatcattaaagaagttaagaagctgaatcagagaaaagataaggcttatgagaagctgatgaagaagattgaagagtacggaattacattgattaatcatgcttctgcaaaatcagaggagaaaaaatttcttgagaagtattttatgaaggagatcatgcctttaagttcaccgacaatcgtcggcaagagacaaccatttcctttcttaaaaaatggagaaatttacgcagtcgttgttcttgagacgagaaataagaaggaaagaatcggaatcattccatgctccaacaatatgctgacaagaatggttgaacttcccggtggaaaaggaagatatatgctcattgaagatctgattcttcattatattggcaaagtctttaagggatacaaggtaaaggggaaatctttattgaaggtcgtaagaaatgcggatatcgatgccgatgcggcttatgatgaggatcttgattatcgtgagtttatggaagatctgatgaagcagagaaagaaactctctccggtgcgtattgatctttccagagagatggatgaaactgttgtagacgcattgtgcagatacctggatgtaactccggatagagtattccgtagtgaagcaccactggatgtttctttcgtgttccagcttcaggatcttctgcgcagaaatacagagctcttctatgaaaagcgcgtgccgcagaagagtccggaattcaaggatggacagagcattttacagcagatcacacaggaagacaagctgttatcctatccttatgattctatcagacctttcctgaaaatgctgacagaagcagcagaggatgacagtgtcatttccattaagatgacattgtaccgactggcaaaacagagtaaggtcatcgaggcactttgcgaggcggcagagaatggaaaagaagtagttgttctcgtagagcttcgtgcacgttttgatgaggagaataatatccgctggtccagaatgctcgaagaggccggatgccagatcatctacggactggagcattataaagtacactccaagctgtgcctgatcacacgcagaggggaaaatggaatccagtacatcacacaaatcggaacaggaaactacaacgagaagaccgcaagactttatacagacctctctcttatgacagcgaatgagcagattggaatggatgccgcaagagttttccaggcactggctaaaggtgaagtagttgaagatatggaacatttactcgttgcaccaaaatgccttcagtctaaagtgatcgagaaaatcgaggaacagatccagaaacagaaaaatggagagactgcatacatcggcctgaaaatgaattctctgacagataagcgtatcattgataaattaatcgatgcgtctaaggctggtgtgaagattgacatgatcgtcagaggtatctgctgtctgatcccaggtgtggaaggtgagacagagaatattcatgtgatcagtgttgtcggaagattcctggaacattccagaatctatatcttcggaaatggagaagaggcacagtattatatcggatctgctgatttcatgacacgaaatacagtgaagcgtgtagaggttgcagcgccagtttattccgaacgattaaagaaacgtctgcaggatctttttgatttgatgttaagtgataacaaaaaagcgcgaaaggaggatgcaaaaggagcctattctgtggtagaatgtaagggacagccaattaactcacaggaacttctttatcaggaagcctatgcgaaagcagcagtgaacagtagtaatcagttggaggcggctgtacaacagacagaaaataaggtgatagaatgatctataaattcggggaacgtctgacagagatcagtcaggaagaatgggagaaagaaaagtgtcctgctgtgttcctcacagattccaatcatgcggaggagacattggcaacagtagggatcatatatgaaagtgagatccagattgcgaagatcggattctgtaagattgagaatcagcaggaatgtatggtaggaactttctgcattccaaagcttcttgatgtattaggaagcagataccgaatgtacatgtttgtaaatgaaaataatgttgttatcgtagatgacgagacattttcagagcgacttattagtaggattaagaggaaacgaatgcatcagggtgagacgaaagagagattcctctataattacatagcagaattcatgagtagggatctggagatccttgtggcctatgagcgtagacttcttcggatggaagaggatgtgtcccaggatcatacagatacgatccagaaccgactgatgccgatccggagggaacttctgaatctgagaagctattatgatgagatgatggacttgacaaaagagcttgaagagaacgagaatggattgtttttgaatgatcaattgaaatacttcggaacacttactgaccgtgcagaccgtctgatgagccgtacttctcatctgttggaatatgcccgtcaggtaaaggaggcttaccagtctcagattgataatagacagaataacaacatgcagtttttaacagtgatttctacgattttcttcccactgacattgatcacgggatggtttggaatgaacttcaaagatatgcctggacttgaaaatggatatccggcggtaatggcacttagtattgtcattatcgtgatctgtattttgatcttcaagaaaaagaagatcatctaaaaaactgaaaaaactgtaaaaataacgttgacaatcctcgattgaatgctataatgatggtcagaagaagttaaggattataaagcaacatagttcttagccgataatacgatgacgagacgagtaggatgtggaatgttacagagagagatacatttgctggaagtatcttagcaggaatcatttgaagactacctctgagtggccccaatccggtccggtgattccgttataatcatgaatgaagtggttttaaagcagtacatttgctgtgatcttgaaaacaaaaagggtggaaccgcggatagtaaagtaattgataatcagactttatccgtcccttgcatgtgagtgcaggggatagatagagtcttttctttttccatagaatccccgaatgaaagcatgcatagttacttgaagaaaataggaggaagcgaaaatgattattacattaaaagatggatcaaaaaaagaatattcagaagcaaagtcagtgatcgacgttgcatttgacatcagtgaaggacttgcacgcgcagcctgtgcaggagaagtagatggagaggttgtagaccttcgtacagttcttgataaagactgtgaactcaatatccttacagcaagagatgagaagggactggcagtacttcgtcacacagcatctcatgtaatggcagaagcagttcagacacttttcccagaggcaaaggttgcaatcggaccttctattgatacaggattttactatgatttcgaatgtcagtcattttcaagagatgaccttgacgctatcgaaaaagaaatgaagaagattatcaaaaaaggcgcaaagatcgaaagatttacaaaatcaagagaggatgcgatcgcatttttcaaagagaaaaatgagccatacaaggttgaactgatcgaggatcttccggaaggagaagagatttccttctattctcagggagactgggttgacttatgtgcaggcccgcacctgatgagcacaaagggaatcaaagcattcaagctgttatcatcttcaggagcttactggagaggtgatgagaacaaacatatgctgacacgtatctacggtacagcttatgcaacaaaggatgaactgaaagagcatctgacacagttagaggaagcaaagaaacgtgaccataataaacttggtcgtgagatgaagcttttcacaacggtagatgtaatcggacagggacttccgctaattatgccaaacggtgttatcatcatgcaggaactgcagcgttggattgaagatgaagaggcaaaacgtggatatatccgtacaaagacaccacttatggcaaagagcgatctttataagatttccggacactgggatcactataaagaaggaatgttcgttttaggagatgaggagaaagataaagaagtatttgctcttcgtccgatgacatgtccattccagtattatgtatacaaagcagagcagcacagctaccgtgatctgccacttcgctacggtgagacatctacactgttccgtaacgaggattccggagagatgcatggtctgacacgtgttcgtcagttcacaatctctgagggacatttagtagtaagaccagatcagatggtaaaagagttcaaagattgtatcgcacttgcacagtattgtctgcaggttctcggagtagaagaggatgtaacatatcacctttctaaatgggatccaacagatactaagaaatatattggagcaccggaagtatgggaagagacagaaggtcatatccgtacaatgcttcaggaactcaacattccattcgtagaggatgtcggagaagcagcattctacggaccgaaggttgatatcaatgcgaagaacgtatatggtaaggaagacacaatgatcacaatccagtgggatgcgcttcttgctgagcagtttgatatgtactatatcgatgagaatggtgacaaacagcgtccgtacatcatccaccgtacatctgtgggatgctacgagagaacactggcatggctgatcgagaaatatgcaggaatgttcccaacatggctgtgtccggagcaggttcgtgtgattccgatttctgataaatacaatgattatgcagcgaaagtggaagcacagcttaaagaagctaatatccgttgttcagtagatggacgttccgagaagatgggatacaagatccgtgaggctcgtctgaacagagttccatatctcttaattgttggagcgaaggaagaggaagagcagaaagtatctgtaagaagcagatatcttggagatgaaggttctaaggatcttggagaattcatcgaagcaatcaaggatgagattgcaaagaaaataatccgtaagattgaagtagaagagtaagaatagttacccgaaacaacaaaaatgcgaatctcccgaagaagttcaagtatgaaaatactgatttctacgggagattcttttttaaagtcatgttgtaactgttcagagccaacctccaaaatgctacgcatttcgtcggtgtggcgtatccgccaaataaaatttcaaaaacagtcttaaaaatacaagcatttttaagactgttttatgaaattttgcttggctctgaacagttatgtcatattataatatccggcataaataccatttttctcaagcagagtttcatgtgttccgcgctctgcgataccattttctgtaataacaataatctcatctgcatttttgatcgtggacagacggtgtgcgattgtgatggtcgttctgttcttggacagttcttccagactgtgctggatccagcgttcactctcgttatcaagagcactggttgcttcatcaaggatcaggatcggtggattctttaagaagacacgggcaatcgagatacgctgtttctgaccaccggaaagtcttgcgccgcgctcgccgacgaatgtatcgtactgatcaggcagttccatgataaagtcatggatgttcgcacattttgctgcttcgatgatttcttcttctgtcgcatccggcttgccataggcaatgttgtcgcggatggaaccggagaagaggtagacatcctgctgaacgacaccgatctggcttctaagactcttcaatgtaagagagcggatatcctgtccgtctactgtgacgcgtccgccagttacgtcgtagaagcgaggcaacagggaacagattgttgtctttccaccgccggatggaccgaccaatgcaactgacttcccagcaggaatctcgatcgatacgtgagagagaacagtcgtttcatcgtcgctgtaatggaaggagacatcttcgtagcagacacggcctttcacatctttgagttctactgcatccggtgcatcctgaatctcaggttctgtctccataacatcaaggaaacggcggaaaccggaaagtcctttctgcatcatttccatcagctctacgagaatctggatcgggctgataaagattccgatataaagagcatacatcgcaagatcagcagctgacatttcattgttggcaatcagatagccgccgtatacaagtgtgaccagatacatcattccctggaaaaagagattggagctcatgaattcgcccatgcatctgtaattgtctttcttggagacaaggaaggcgtgattgctcttctggaatttttccttttcgatctcttcatttgtaaaagactggacaacgcggatcccggataaagtatcttgaaggctcgcattgacatcaccgatcttttttctgttttccataaaggtgcgctgcatcttctgattctgtcggaaagagaagaggaacatcaagatcacaagtacgatcagcggaagagccagcttcttattaattaagaaaaggaaaataaaggatccgacgatcttaactaatgagataaataagttctccgggccatggtgtgcaaactcggaaatgtcgaacaggtcactgaccagcttactcatcatctgaccggagttgttctgactgtaataggaaaaggacagctcttcatagtgttcgaagagttcctgacgcatatcccgctccatcttagcgcccatgatatgtccctgacagctgacataatatttgcagaagctttggatgacatacatcataaagagtccgatcgcgatccacggaagcgcctgcaggataattgctttatcctgagtaaaaagtgtcttggtagcacttcgtagaatctgcggataagcaagatccacaagactgataatggctgcacagagaaggtcaataaaaaagaccgttttgtacgggccatagtagtggatgaatttttttagtgtattcataaacaaataaatcctccctattttttcttatatacattagtttagcataagtaaatgttcttgacaagaaagtcggggtatgataaaaatgttattactgttaaaaacaatgcaaagaagtggaaaaagtcaggagaacgattaatgaatttatatcttgccccattggagggaatcacaggacatatttatagaaatgcattacatcagtgctttgacggattcgataagtattttattccgtttatcagtccgaatcagaaaggacatttcagcacaagagagaagaaggatgtgatgccggagcataatcagggaatgtatgcagtgccgcagatccttacgaataacgtggaagattttttgtgcacagctcagaaacttggagattacggatataaagaagtgaacctgaatcttggatgtccgtctcgaactgttgtgacgaagggaagaggagcgggatttttggatgagccacagaagctggatcgatttctggatgcggtttttgagaaatgtaatctggaaatctcaatcaaaacaagaatcggaatggaagatccggaggagtttgagacaatccttcctatctataataaatatccgctgaaggagctgatcattcatccgcgtgtgcagaaggagttctataagaacacaccaaagcttgatacatatgcatgggcagtggaacatagcgaacatccgctttgctataatggggatatctgttctgtggaggacatggaacagttgaaaataagatttccacagacagatactgtgatgatggggcgcggcgtgctggccgatccggcacttggaagaaagctaaaaggcggaagtgccgcaacgatagaagagctaaagaaattccatgatgttctctatgcggcatattgtgaagaaatgtcaggagaccgaacgattctttataagatgaaagaaatgtggttctatcttcatcccatctttacagatggaaggaagtatttcaagaagattaagaaatgtgagaaatgtgtagtatatgaatctgtagtgaaggaattgtttttgaaagaaaccgttctgggaaaatgatttgaaagaggtgaaaaaaggaaatggacactattttacaattagatcagaacattctgctttttattcaagaatatatccgtcatgactggatggactggttctggaaagggatcacgcatcttggagattttggaatcttctggattcttcttacaatcgttctgctgattcctaagaagacgagaaaggctggggttgcatcagcactggcacttattataggaacactgatcacaaatgtggcgataaagaatgtggttgccagagtaaggccgtatgaagtgatacaggaattagaacttatgattgagaaacagaaggatttttcttttccttccggtcatacatgtgcatcctttgcatcagcatttgcaatctacaagtgcaaggaagtgtttccgaagaaatggagaattgcggcaatggtattggctactttgatcgcattatcgagattatatgtaggggtacattatccgaccgacgttctcggcggattgattgtcggactattctcgggctgggcaggatggaagattgaagagctgatcatgaaaaagagagcagagaaaaagaaatctgctgataataagtgaaggacaggaatttaagaatctgtcgtcagatagaaaaaggatttgattcatctgggttttgccagatacgatcaaatccttttttgagtccactttagagtgtgacttttaaaattttgctatttatttttctctttctgattctccagtgcagcttcaacgaatcccttgaacagtggatgcggtctgtttggtctggatttcagctccggatgcgcctgagttgcgataaaccatggatgagaaggaatctcaaccatctctacaatacggctgtccggtgaaagtccgcaaagggacattccgttttcttcaagaacttcacggtagtcattgtttacttcataacgatgacgatgacgctcttcaatctctttctttccatacagtttataagcaagggagttgtctttaagtacacatggataagaaccaagtcttaaagtaccaccaatatcttcaataccaatctgatcggacatgatgtggatgaccggatgagttgtatccggattgagttccatgctgtgtgcgtctttgtaaccgatgacatttcttgcaaattcaacgatagacagctgcataccaaggcagagaccaaggaacggaacgttgtgtgtacgggcgtatttgatcgctgtgatcttaccttctacaccacgatggccaaatccaccaggaacaagaataccgcttacgtcagagaagagttcttcagcattttcttctgttacagtttcggaatcgatccatttgatatttactgttgtgtgtgtgtaaattccgccgtgctttaacgcttctacaacactgatgtatgcgtcatgaagctggatatattttccaaccagtgctacagtcacttcctgtgttggatgacgaaggttttcaaccatctcagtccagtctgtaagatccggttccgggcagtcaagatgcagagactcgcatacaacctgtgccagatgttctttctccatggcaagtggtgcctcgtagagatattctacgtccaggttctgaagtacatggtcagccgggagattacagaacaaagaaattttgtttttcattgcatcatccagtggatattcggaacggcagacaatgatatccggctggattcccattccctgaagttcttttacacttgcctgtgttggttttgtcttcatttcctgagatgctcttaaataaggaatcagcgtaacatggatcaggataacattttctgctccgcgttcatgctgaaactgacggatggattcaaggaaaggctggctttcaatatcaccaacagttccaccgacctcaatgatagcaatctcagtatctgttgcagccggattacggtagaaacggctcttgatctcatttgtaatatgagggattacctgaacagttcctccaccgaaatctccgcggcgttctttctgaagaacggaccaatagatctttcctgttgtaacattggaattctttgtcaggctttcatcgataaatctttcgtaatgaccaaggtcaaggtcagtttctgcaccgtcatctgtaacaaaaacttctccgtgctgtaccgggttcattgtacctgggtcaatattgatgtaaggatcgaatttctgcatagttacagtgtaaccacgcgctttcaaaagtcgtcccaaagatgcagctgtaattccttttccaagaccggatacaactccgcctgtaacaaatacatattttactgccatagtgtctttcctcctccgtgaatagttgttatcaaaaaaaatactttccaagtatacacctattcagaaaaaaattacaatacttttttgataaaaacatagaaaaaagatgggatgaagtgattttgacgaagtaatgtaaagaaggaaggcgaaaaagctttgtaaaatgggagaaatgcagaaaaaaacctctcagacagcaggtggttatacctgaaaccgcagagaggtttttgtgatatctttctgtattggtaaggatttgtctttagcttaaaatctgacgttcgttcacagcttcacttgtgagctgtacaccaagttttttaaatgtcttgatatcaacacttgaaagcattacggaagtatgagcctggcatcctttcagttttggaagctgggagagtgcaagctcagcgatcggattgacagcagcacttgcggaaagtgcaatcaggatctcgtctgtgtgaagacgagggttcttgctgttcaggtaatccactttcaatttctgaatcggttcaattgcttccggagagatgatatggacattgtggtcgatgccggcaagttccttcagtacgtttacaagaagggcagcgctcgcaccgagcaggttggaagtttttccggtgatgatgcgtccatcttcaagctccagtgcggcagcaggtccgcctgtctgctgagcacgctccagtgctttgacagcaacttttcggtcagaaacagtaattccttccatattcataagaagctcgatcttctcagcttccttctcagaagcatcacctttcagaagcgcattgagtgctgcatagtagcgtcggatgatctcctggcgggaagcttcacggcaggcttcatcatcacagatacaatttccggccatatttacccccatgtctgtaggtgatttgtatgggctggaaccgtagatcttctcgaagattgtatttaaaacagggaagatctctacgtcacggttgtagtttacagttgttacaccataagcttcaagatgatatgggtcgatcatatttacatcgttaaggtcagctgtagcagcctcataagcgaggtttaccgggtgcttcagcggcagattccagatagggaatgtctcgaacttcgcatatccggcttcgattccgcgctggtgttcctgatataactgagacaggcagacagccatctttccacttccaggtcccggagctgttacaataacaagcggatgtgaagtctcgatataatcgttctttccgtaaccattctcactgacaatcagtggaatgttggacggatatcccggaatgttgtaatgaatgtatacagagattccaaggttctcaagacggttcttgaacagaagtgcactttcctgtccggagaactgagtgattactacacttccaacgaaaagtccctgctcacggtaagtaccgatcaggcggatcacgtctgaatcataagtgataccaagatccccacgaatcttattcttttcaatgtcttttgcactgattgcaaagacgatctcagcctggtcgctgagctcctttaagagacgcagcttgctgtcaggttcaaatcccggaagtacacgggaagcgtgatagtcatcaaaaagctttccaccgaattcaagatagagtttgccaccgaattttccgatacgctcgcggatatgttcggactgcattttcagatatttgtcattgtcaaatccaattttcatcattttatcttccttactataaattttgccgaactgttattactattattaacagataaatctgttataaacaggcattacttttctagtatactatgaaacggcacgtttttacaatattttcataatctttttattgatttatggaaaaccactatttataatggtaggaagtagttgtttttttacaaataaggtaaaagatttgctggaaaataaccactatttaagttttggaggaaaaaaatggagaataacaataaaaacaaaggcccgaacaagaaccgacagggttggggaattattttgttcactaccttggtggttacttttgttgttatgggcctatattctatgatgcagggcggaagcgcttctgagatcagctatgataaatttctgaaattagttgataatggaaaagtagagtctgtcacatttaccaattcaaggatcaatatcgttttgacagatgacgccagaaaggaaaaggcagagggaaaacttacagaagtaaaggataatgagaaagcttctgcagaccagagtgatagttcagattctaaggaaagcgaagatcaggaaaatgttatggacagtctgcttggccagatcagtcagatgcagggtagctccaagagcaaggaaccggattattacacaggaaatgtatcagatgacacacttgtaaagcgtttagataaggcaggggtagagtttaaatcccagattccggatacggcaagttcactgatcatggatgtcttcatcacagtgatccttccgatcgtacttcttgtattcatgtttaatttccttatgaagaagatgtctaagggcggcggcatgatgggaatcggcaagagcaatgccaagatgtatatggagaagcagacaggtgtgacattcttagatgttgcaggtgaagatgaagcgaaggagtctttgcaggaagttgttgatttcctgcataatcctggaaaatatacaggtatcggagcgaagcttccgaagggagcacttcttgtaggacctccgggaacaggtaagacacttcttgcgaaagcagttgcaggagaggcgaaggttccgttcttctccttgtcaggatctgcattcgtagagatgtatgtcggtgtaggtgcttcccgtgtgcgtgacctgttcaaacaggcacagcagatggctccatgtattgtatttatcgatgagatcgatgcaatcggtaagagccgtgacagcgcacttggcggtggcggtaatgacgagcgtgagcagacattaaaccagcttcttgcagagatggatggattcgatacgaataagggactacttgttcttgcagcaacaaaccgtccggaggtacttgatccggcgctgttgagaccgggacgttttgatcgccgtatcatagtagataagccggatctgaaaggtcgtgtcgagattcttaaggttcatgcgaaggatgttaagatggatgagacagtcaatctggaagagatcgcgcttgcaacttcaggagcagttggatcagatcttgccaatatgatcaatgaggctgcaatcactgcagttaagcatggcagacaggttgtcagccagaaagacctttttgaggcagtggaagttgtacttgtaggtaaagagaagaaagaccgtatcatgagtgcagaagagcgaagaatcgtatcttaccatgaagtcggacatgcgcttgtcacagcacttcagaagaatacagaaccggtacagaagatcacaatcgttcctagaacaatgggagcactcggttatgtaatgcagacaccggaggaagagaagttcttaaatacgaagaaagaacttgaagcaatgatcgttgttgcactcggtggacgcgcagcagaagagattgtatttgacactgttacgacaggtgcatcgaatgatatcgagcaggcaacgaagatcgccagagcgatgatcacacagtatggtatgtcagagcgctttggtctgatgggacttgaatctgttcagagccggtacttagacggtcgtgcagttcgtaactgtggagaagcgacagcagcggagatcgatgaagagatcatgaagatgctcaaagcttcctatgaagaagcaaaacgcctcttaagtgcgaacagagatgctcttgataagattgcagccttcctgatcgagaaagagacgatcacagggaaggaattcatgaagatcttccgtgaagtgaagggaatccctgaaccggaagaagcagatggagaaaagaaagaagagcaggagtccggaagaatcctgatgaagccgacagaggcacaagcagcagagccagaaacagtgaaagaaccggaaacagaaaaagagccggaaacacaggcaacagaaatacagtcacaagaaacggtggcagaagaaaagtcagagtaagagctgattatcaatattaagagtttcgcagatggagaggaaaagtcatttgcgaaactctttttctttgatgaaaacatgttataatgaaatgaggcaagaatgccgaggcattcttgaatgcaaggcacagaagatgcaaaacatcaatcaagacagtagcaaaaaaacaggagacattgggatgacaaaagcagtattttttgatatagatgacaccatttatgattatattggagcgcataataatacgatgccggtgatgaaagaatgggcatatgagaacttaggcatagcaaaagaagacttggagaaatatgttgccgaggcaagagtgaaggcagatgacagagccggaagagattatgcggtgaaccataatcgcctggtgagatttcagtgtatgctggagacacttggaaagccggttttcccatatgcgtatgagatgtataatctgtactgggatacattgatcgatcagattattccatctcctggaattgaagagttgatgaaagaattgaaacagcgaggcatttatatcggtataggatccaatatgacttcagacgtccagtatcggaagatattaaagcttggattaggtaagtatattgatggaattgtgacaagtgaagaggctggcgaggaaaaaccacatcgaaaactttttgatctctgtgttgaaaaagcaggagtgatggtggaagaaagtatctttatcggagacagcatcgcacatgatgtgacaggagcacagaatataggaatgccggtgatcttgtatcggccgaaggaaaatgtgaatgagatcgagtggcttcagacagagaagggaaaatgtccggtcattgcacatttttctcagttttttgaagcagagaagatgttataagaaatgaaaaagatgtaaaagaaactttaataggaataaaaaggagacataagaaaaaacatgaaactggtcgaaaaagttccaaaggatctatataaaatatttggaagtaaatatatggaattctatatgcagtttctggtagcgctttatgaggagagcagtcagtcttattctcttcttgggcttacggaacgagagtgtcagatgatcatgaatgaacgactggcgaagatggcactggactggagtgaggcaagagtcgatgaagaaggagaactgatcaccagagccaacatggcatcagtcagtctgaagcattttgaagactggggatggcttagaagggattatgatgaaacgttgaacagttatgtcgtttcatttccggaatacagtcagctgtttgtagaattatttcagaaattatacagtgaaaatgacggtaaggaacgagagagtgtgcttacggtatacagtcatctctatacccacagtttagacaaagagaagaataatgagattttaaaaagtgcgcttcatacatcaagagcacttctgcagatgctcgcgaacatgcaggagggaatgcgaggttatttcgatgaactgtcaaagcagagaagttttcgaggaatccaggaagtacttgtgaaagagatcaataacagtgacagcaaaaaatatgcgatactgactacaacagacagtttttatcgatataaggaagctgtaaaagagttgatagaggaaaatctggaaaagacagaagcaagaaaatactcatttgaaaccgaactcttaagcgaagaggaaaatacgagaaaatcttatcgtctgcgaagaatgatcgagatctgtgaagaggcgacagatatgctctataagatttcgagagagtttgatgcgattgagcgaagatataataagctgattgaacaaaagacagtatttgcaagccgtgccgcagcaagaatccggtacattatgatggaaggtgtaatggaagaagatcagacagtcgcactgattaatctgatcaatgaaagtggcaagtcggaagagattctggataagttgtcttcaaaacttaggttttcggagccatataagattatgacagagaagagtctgtatcaaagacgtgaaaatcagaaggaaaagttcactccacaggcggtaacacctgagaaatcacaggaagagaatatgacagaatttgtcctggaaccactgtatacgcagaaagagatcagagatttccgaaagaaaaatgaacagaatggaaaattcacagtgacaaaagatactgtaaaatcaatagaagatttggagaagttatttatggtatggcagcatgcaacagaatctgcggacagtaaggcacagattgaagtggcgcaggagatggagaatgaggctggtttccgattttcaaaacttacgatagagggagtagaatcagatggttaattatatggaagaattgtcagtgacagaagctgataacctgaagaaaacaattgctgcattattcagacagacatgtattttacagatgaaatatgatcctgtaacacttgtcccaagagacaatctacattatgagatctgtacaagacacagaaagtttattgaagactatctgtctgttttaagctgtgaattagtgcatgacccacaggaacacatttaccgtttacatggagatggaatcgcgatagaaaagataaatgccaccgttacaaaagtaatcttactggttaaattaatttacagagataagattttaggagaaggattgaaagctacagtgacgaatctggcggagattcgtgaatatggaaagaatacgaatctgattaattataagcttacgatgggtgagtggaaagaagctttatatgtgatgagtaagcatcagatcattgaagtgccgggagcaatccagaatgttgaggatgagactccgatttatatctacagcacgatcaatctatattgtggaagtatggatattactgcgttgatcaaagaatatcaggaagatcagtacgcagaggaagagattacagaagaagtttctgaacaggaaatccaggaagaagcagagggaggtgtggaagatgaaagagaagcagtcgaagaaaatatttactagaatgttaatgaataactggggcggtatcagtcacaaagtgatggagttccatgagtatgtgaatcttttcagtgggaaaagtggatctggtaagtctactgttatggatgcgatccaggttgttttatatggaagtatatcttccacattcttgaataaagcggcagatgacgcgaagaacaggcgtagtgttctaagttatcttagaggagcgcagaaagacggttcctttaaccgagaagaccaggacttctgttcccagatcgtcttggagattaaggatacaggaaagaatacacatacttgtattggtgtttcatttgaggttggaaaggcagatacagacatcaggaaatattgtttcttcagtcattccggaaagattccggaggatgaatatttgacagaagaaggtgttccgtatacaatcgcgaaacttaaaaaattggtagaagcaaggatagaatcggctgacaacagaggtcgcggagatgtgaaccgtgtatatccatcgaaagaagcgtatttgaaaacggtttatgatgcaatctttggttatgtagagccgggccgtatgatgacaatggagaaaagcgcgattgcacttcgtatgacgaacggaacaggacagtttatcaaagattatatgttcccaaagagcaaggaagacacagttgcaacaatcagtgatcagcttggcgcttaccgtgagatcaaggaacgtgtagaagatctggagcagagaattaaaatgcttgacgagatcagtcagcataatctagctttgcagaaagtaggagctgataagatctatgtggaacagatcttaaaatatattgaaatagaaaattgtaaagcacatttgcaatcgaaagaggatgatttgcaggatattctcaagaagattgaggaaaaagaagaaaagagaaaatcttatttggcagagaaagatgcttatacgaaagaacaggtagaagtcgaggcagaactcaaagccagcgattatggacagaaagagaaggagctaaaggagattgaaaatacgatccagctcctggcaacgaattcagaacaatggagagatatcgtaaaaggtctttccgcctgggaggaagacgatgaagtcagtgcttatgtgagcaatcaggcgttgcatagaattgatgatatccgagatggtgttgtgagtgaagattcgattgaaaagctaaagcaatatttaagtgatgcactcgacaacatcaatacagaattaggcgatgtccgcgaaagaatccgtgagaatcagaaagaacttcaagagaagcgggagatggtagaagacctcaaaaatgacagaaaaccatatcgtgcggaattgaagcatgcaagacaggaattgcagaatatacttagtactcagtatggaagaacgatccatgtaaatatctttgcggacttgtttgatattacggatgaagagtggaaaaatgcaatcgaaggacgtatgggacgtgtgaaacacagtctggtgacagcacctgaatatacgttagatgctgcgaaagcatttcgcaaaatgaagcagatgaaggggatcgaggatgtcgaactcatggatactgcggcaatcgtgagagacaagccgaaggcagatgagaatacactgtacgagtgtgtgcgcgcagaggaagtttatgtagatacttgtttgaagcgatacttaggccgcattaagaaatgtgagacggtggaagaacttcatgagacgagagatggtgtcacaaaggactgttattcctacagcaattatattttcagacatttaagaaagaatgattatgagaaatatgcctgtatcggaacgaaagtctcaaaggcgaaacttcttgagttggaagaagaagcagcgaagctgaaacaggaagtggaagaggactgccgtgttgagatggcactgcgtgcagcacagaaatttgagtgtctgaaccagagtacagaacagatcttacatctttcaaaagcagcggaacagcttcaggattattacgagaaacaggaaaaattacgtctggaagtagaagaattgaaacgaggcgaccggacagtcgaactgaagaagaaaaagcaggaattactggagttgcttaagaaaaatgcagagattcttgatagcattcaaagtgaagtagtacagtatgcgaagacacagggacaaatcgagagtaatatcaaatcattttcagaaaagatagacttcctgacagagggatttgttgtcaacgaacagcttcagaatgaagtaacagatgcgttaaaagtacagagcgaagcagcttataagagagacaagacaaaagaaaaggatgctttggaaacgttggaagagacggagaaagaagaactgcaaagaagtagaaataagttcaataatgcttatccggcctatggttttacaggaatagaacatgaaaatgatgtgtatgacaaagtgctgaatcagtgtaggaaagatttcgaaccgaagtacaaggaagaattcgataagcagtataatctggtttaccatacattgcgtgaaaatgtgattgcttccattcatggtgaaatcaaggcagcttacagacataaaaaagagatcaaccgtctgcttgcgaagatcaagttctcagatagtatttaccagattgatatcataccggctcagaatgaaaacggacagttctatgagatgcttacagcacctgaactagacagtaaagtgttcgatgactacggatttgaaggtcagttaagtcttggtgaggatgagttctatcagaagtatgaagaagatatcaagcgtctgactgagaagttcatgcctccgaaggaggaagatgcaagatccttaagccagtatcgtcagcagatggaacagtatgtggattatcgtaattatctgactttcagtatgtatgaaaaggtggaagatgagaatggaaatatccgcaaaaatgcagtcgatgatatggcaggccgtgactccggaggagagggacagaacccgaaatatgtcgcactgcttgcaggttttgcgatgctctatatgcagcagacaaaccgtgattctaagatccgtctggtgcttcttgatgaagcattttccaagatggataaggagcgaagcgaagtgtgtcttcattatgcgagagagctggagcttcagctgatcgtatgtgtaccggatgaacgtctgcagtcgttgattcgaaatgtggactgtgtctatggattcagaagacatcagaatcaggtatccatgatgcatattgataaaggtgattacctcgatatggttgagggaaatgaataaggaaagagtatggaattgaataaaaagaatctgccgttggcaaaatggctgatcgataagacgaatacaaaggactatcgcataggaaatctctcgggaatgaagcacccaaaggtggatggagaccttttaaaaacagtaggtggcagagaggaactggtcagacaagcaaaagttctggaacggatcccagcattgggtggagaagagtatctgtattttgactggagagaaatgaatacagatattacgaggattgattatcgggtagaagtgattccaagattatgtgagctgattggaatcatggatccaagagagcgtcagttacaggcaatttcaagaatatgcaaactgcaggtggatgtatctgaaagctgtctgtgcgcttattgcgatcatgtgttagaacagctgaataaaggaaatacaaaagagttatccaaagcggaggatgaagaatttcttaaatgcctgaaagcattagctgctctgaaagaaccggaatggaagcgtgtgttcagctccaaagtatttgaaaagaaaaatgatatcacaccatctaaagttttcgaacgtatttatcaaggtgcagttattgaaactttgaaatactctccgcaatatgaagagggcatgtcagatgatgagatactggcagtacatggaatattgagttattctcagacattagaatggaaaggtgctgtggagtattgtctgacagatcaaaatggcatagcgagcgaggagaaaattgacacttcttcgaattattatggaacagtaattaatgcacagacattagagcatgctattccaactttacgaaatggtgttgaaaaaatcattgtgattgagaataaagcgaattacgaaagcatggaatatgatccaaaagttttatatatcttttgtcatggctacttttcgcccaaagaagttcgttttttgcaaatgttaatgaagacagcaccggaagaaatccagtattatcattggggagatatggattacggtggaatacagatctttttatacaatgagaaaaatattttcccaaatctgatgccatggaagatggacgctccttcttataaggcagcgttggaaaatggaaaaggaattaagctaagcagcggaaagcagaaaaagttagaggcattaaatgccggtaaattggaagcgttgaaacagtgcatattggaaaataagatggagatcgagcaggagatgttaatataaaaacgtctcgatttcatttacagtcattaagtttattcacaagataaaatgctttgttgcggagaataccattctccttcagtcggattatatagcttgtaccattgttagagtccagatctatttggaatttcaaatacagtacgattatattaaaaaagatacgattataaaagaaatataaggagcgtaatgatagaatctggaaaagctgaaaaatggttaggatatttgatcggccctacgggcgcgttattgttaaacgcggtattgggaacttatttaaatgtgtattacacggatgtcttgaaactgacaaaagtatggggcggagcatttcttgtgatttttcctattatttctaagattctggatgcgattacaaatgttactattgggtatgcaatagaccatacgcatacttcggaaggcaaagcacgtccatggctgctacaatgatggatttacgcagacaatgatttctgttataggaggacttccaatgggaatcggtatttttgcagtgtggcctcttgcaagaagattcggaaaaagaaatgtgaccttagccggatttattttatatgcagcaggtggcatgatctgttggatgcatccgacgaatatgacaattatgctgattggacagcttattaaaaatatcggcggacttccttgctcttatgtatttatggcactgtttgcagatgttctggatcatatggaatggaagacgggatttcgaagtgatggactggcgatgtctgtctacaacattattgcaatagcaatggcaggtgtctgtacaggattatttaacggactgttggcaagaaatggttatgtggcacctgagcttgtaaatggtgtgacggtagctgcaattcaaaatgaagccgttaaaaatgttattacatttggatatgtaggtcttgaagtaatcacagcagtaatactagtggttttattgagttttttaaatgttgaaaaggatattgataaaaaacaggaagaaattaaagaacgttagtaaggaagacctttagggacggggtttgtggcttttttgcttgtaatgtaatcagagggtagaatatggaatggaacgaagaaaatttgccattagcaaaatggttgattgataagacggatggacagaactatcgcacaggaaagctttttggaaagaagcatccaagggtagatgggaatgttttgaaagaagtaggtggcagagatgaattagtaagacaggcgaaaattttggaacgaattcctacgttgggtggagatgaatatctgcattttgactggagagaaatgaatacagatatcacgaagattgattatcgagtagaagtaattccaagattatgcgagctgattgggatcatggatccaagagaacgccagttgcgggcaatttcaagaataggcaaactgcaggaggatgtatctgaaagctgtctgtctacctattgtaactatgttttggaacagttgaataaaggaaatacgaaagaataagctaaagccgaggatgaagaattcctaaagtgtttgaacgtatttatcaaggtgcagttatcgaagctttgaaatactcccctctatatgaagagggcatgtcagatgatgagatactggcggcacatggaatattaagttactcccagacattagaatggaaaggtgccgtagagtattgcctgataaatcaaaatggtatagtgagcgaagaaaaaatagatacttctgcaaactactatggaactgtgctcaatgcacagacattagagcatgcaaggccaattttgaaaaatagtgttgaaaaaatcattgtaattgagaataaagcaaattatgagagtatggaatataatcccaagattttgtatatcttttgtcatggttatttttcaccaaaagaagttcgttttttgcaaatgttgatggggacagcgccgaaagagattcaatgttatcattggggagatatggattatggtggaatacagatttatatatataacgagaaaaatatttttccagagctgattccatgggaaatggatgtcgcatcttatgaagaagcattgaaaaacggaaaaggtattacgctaaacagtgggaaacgggaaaagctagaaatgttgaatgctggaaaattagaagtgcccgcatcgcaataaatgtcataacagtaaaaagggatttgaagagattgaatttcgaaaagatgagtttatcaaaccacatagacaatggctgaaatacgaagggaaaaagtcggatatcaaatctcgcagacgaaaaactgtattaaaaaaagcggtaaccattattttcagaccaaaccgagaaaaaatggctcaaaggatgtgcctttctgaacatccttttggaaccttgaaacgaatacagggaagttattactttttacttcgtggaaatcggaaaacacagggagagtttgcccttttttcattaggttacaacctacaacggttattaaaccacctaggatttaaaaagatgatgaaacaactgatatcaacaggttgtttcggtctgaatttttgtacgatattcattatccagcaactagatcattcaactttggagttggcataaaaagagcgggaaggctgttcgatattatcggacagcctgcctgatggtaggacacaatattctgatcggtgcacttggtgtatttatcctttggtttggatggtatggtttcaatggcgcagcagcaacagataccatgcagttatcacagatttttgcaacaacaacgatcgcacctgcagtagcaacctgtacagcaatgctgtatacatggattagaaatggaaagccggatgtttccatgtccttaaacggatctctggcaggtcttgtagcaattacagccggatgtgcgaatgtagatgcaataggagcctttgtgattggtgcgatagcaggtgtccttgtttgtgtggcagtatactttattgaagataaattaaaagtagatgatccggtcggagcagttgcagtacacggatgcaatggtatctggggaacaattgcagtaggattttttgattacaatgacggtttattatatggtggtggtgtacatcatttattgatccagttactcggtatcgcatgtattgcgggctggacgatcatcacaatgacaattgtatttactgttcttaagaaaacaatcggactgagagtatcggctcaggaagaaatggaaggtcttgactcatctgaacatggtcttgaatcaggatatccggattttgtaagcagagaacttcattaagatgcacgaatctattcggttagattcgtggaatctaatccccttagttagtatataaacacaaaaaaaccagcgtatgctggtttttttgtttgcgtggaaaccggcagaacagcaagaaacataaaaaatagagaataaaattttataaaacagcaatatactaaaaaaactgaacaattattatgataatacgatattgacagaaaattcaggggggggtataataaaactacattgggagagtaggagtgactggaagtggttccaggcagcaacaactgttcgaaatcgcttcaggtcaatttcttacattgacacagacaggataaggaatcggaggacacgcgaatgagaaagggtacaggaagaagaacaattgcatttttattagcaatcctgattgtaatcacatgtccgggcgaagcagtcaatgcgtacgggatgatttcatataaagatgcatccgcagaacgtgtagggctggatataacagaagcagacaagcaggatgagtctgcctctgcggatacgaagaaaacagagaacacggatgcagaagacgagagtgacaggacaggatccgaagagaaagcatccgatacagagactgctggcacgaagacaaacgaagtgactgagtcaacggagaatacagaaacaaccggaagcacagaaacaaccggaagcacggaagcaacggagacaatcgaagcgaccgaaacagaagaatcagaggacagcgcagatcatccggcataccaggcagaggatttgagatttctcgtccagtccaaagaggacttcggggatttttcactgacagacggcatcacctatgatgaggaacactatacactgtccgtgatcgatgacgatgattttgactgtgaatatgtcggggattatgtgatccggtatcgtctgactgcaaaagaagcaggctacgaggatattgagtttacaaggacgatcaccatatacgcggacgagcagtacatgcacgacggtgtcctgatctacggacatactggcgatatggagatggagcttgcagaagatgcagaggatggtattgctgcctatgcggtaagtactgtcaatgttgtcggtaccggggtatttatggattattttaaatgtaaatcctgggattgggctaccggtacagaagtcatgtatgcagagaacgtgaatggctataaccgtttggtctactgtcttgagtctaacagggcaacaccgggtggcagtaacgtaaattccggagcattttcagatacgctgcaaaaacagttaaactacgttttgtaccacggcgcacgttattacggctatcggtgctttacagaaaaataccaggggtataacgcaaacgaagattactatatcaccagtatggcagtacatatgctgaacgcatgggctggaaatgaacctgggtatatctttaccaatgcaatggtagagagaatgagcccagatggacagagactttactggaaagtattcgatctggtaaatgatgccatggcaaatgccaactattactataatgaagcaatgtggtcaaacaaccaggtgacactcaatacctataacctggatgaatggacatatgataagaaaaataacgcatatcgggtaaagggatattattacccatcgtttggcgatatgtatgcatacactggaagaaatgccatttcctgcgttgaccagaacggaaagaaagtaggaatggtacggttcgaacataaatatatatattctgcattctggattcagctaacagaaaaagaatacgaagcacttcagaaaaccggtggaaaattgacagcggtgatacagtacagaggttacctgcggaaggcaacgagatacatatacaatggtataaaatggaaacagccgaccgctatgttacagttcgatggcagtgaaaggacaagaaatctgactgtaacagcgaccattaagcagaatctggcaaatgtctatgtacagaaagtagaagaaaatacgaacatatcattgtctgacggtttcgaatttgatatctatgaatggaacaaaaacagcaaagcatataccaaattaggcagtctgacatggaagaaaccttattatacaaatgattcactgaaactgccaattacggttatcaatcagggaaaattcaaagtagttgagacgaaagcagacgcttcacataaagttggctggtcaaaagaatttgtggcaacgagtaacaacctgaatatttatctgacagcgacgaacgaaccaaatccgtcgaaagtcaaaataataaaaacagggagcgatacagggaaagcgttagcaggtgcagaatttacactgtataaagacaaagactgcaccgatccagtgaaagtggatggaaaggcagttacagtcacttctggtacagacggcgtggcagaaacagctcaatttgtcagaacgcagacctcctactgggtaaaagagacgaaagcgccggatggatataagctggcagaggaaccaaagcaggtggtcgttccggcaggtggaacaggaacggtaagatttgaggacgaacggagccagtaccgggtgaaagtcgtaaagacctgtacacaggacaaatcctatttggagggtgcagtttacggtgtttattcagaaagatcctgcagtagcttaagtcttctgacaaaagtaggaccgacaggtactggcggagtagcagtcagtgatccaatcgattatgatccgaatgtgacaacgatttatctgaaagagcttgttgcaccgaaatatcataagctgagttcaacagtttatacattaaaggtatcctctgccattgataatggtggagtcgttacacttactgcaacggatgaggtgcagacaacgacggcactgatccacaaagtgggcgaggatggaaagggacttgccggagcagagtttgctctttataaagatgaaaactgcacggaagaagtagtaaagataggacctacaaatggttcgggaaatgcagaatcaaaaacgttccatccaacacaggatacttactatctgaaagagaccagacagccaaccaattatccagcacagccggataaagtatataaggtgagcgtgcaggacggcaaggcaatagctggcattgagtatacggtaacgaatacaaataagatccagattgtagcatacaaatacgaagttggttccgggacaaagaagccgctgcgtggagcagagtttacgatttatagtgatgctgcttgtaaaaatcggatagcaacgatggaaccgacgaattccttgggttatgtgaagtcagggacttttgcatatacaggaccgtactgctatgtgaaggagacaaaagcaccggcaggatataagctttcttcggaagtgaaaaaagtcgatgtgagcaatgtagtaaaagatggaaccatcccaagtgtggctttctacgatgagccgtatgatgtgacggtggaagtgctgaaggttgatgcagatgatggtactacaccattggagggagcaacctttgcaatctgcacatcagacacggcaaacaacggcaataaagtggcagagggaacgacagggaaagatggaaagctgacactgagtttccatccgacacaggaaagctattggctgatcgagacgaaacatccggatggatatacaggtactaaggcaaaagagcggattaatatatctgatacccaggaaggcgcggtcgtaaagaaatttaaagttacaaataagaaaagaataaattcatttcctttggaagtaaataagagtatcgaagatgtgaaggatccgcttattcttccggaaattcaatttgaggtatgtgtaagagataaggcgacgggagagattcgcgtattaaaagagttctggacggataaagatgggcatgcatatgtagatgatatagaatatatagaagatgtaaacactgaatattatctgaaagaaataggatataaatttgacgaaaatagtccgccgccaccgtggataccggatttcaataaagaccattgcaaacaatggatcggtcgtacattttcatttacaccgaatggaataaagcttgtagagctaactataaagaacgcgaaacctacgacgctggaatcaaaaatgcgaatcagaaaagtagataataatggtaagcctttgaaaggtgcaatattcagaatttacacagatcaggattgtaaaactttggtacgtgagacgaatcctacagatgataatggatatacagaagtcacaatggatttcgaaaataatgggaatcaaagatatttcgttaaagagtttaaatatccagatggtggtccgtggcaagagcttacggatccgaaagaagtcattcttacgagtgttcataatggcgcggtgacagatgttgaatttgtaaatacaccagaaaaaccatcactgactatctacaaatatgacagtgagaccgggaaaccgctgcagggagcagagtttaatattaaatttttgggcattgataacactgctgccaaggcagtgtggaagacaaatgaagatggaataattgaaattccacaaggggattatttgtttatgtatggtggcctgactataggaaaagtgttcaccatcacagagattaccgcaccgaacggctataaattagcctctccagttaccacaacattaaaggcaggcgagaaccggattgagatcgcagatgatccgaagacctatgatcttcagatcaccaaggaggataaaacggggaaaaagatagccggaactgtatttggaatttatccgacggaggactgtaaggaagaagacagactggctctggctacgacggatgcatcgggaattgctaaagtaaatattccaaatagtgatctgtcaaaggtatacagaagtgtatggatcagggaggaatatgtaccagatggatatgttttagacagagaaccacgttatagacaattagcattggaacgaatcaatacgattagttttgtaaacgaacctgtaactggcattccaatcgagatttataaatacgcgataaaaacagatgctacccagacggctttaagtggtattcatttctatttgaacagaacaaatacaacaacaattacggaagaatcgattgatcttggtactacaaattctaatggctacattcataagcagttggaaaacgtggaaccgggagactactatttagtagagacggatgcaccatccatttatacgaacccggtcaacccacgcaagattacgctaaaagccggcaattcgaaccattttgaggttgccaatgtttactcaacaagtaagtggcatagcttaaagatcaaaaaagtggatgctaatacaaaagatcctttggcgggcgtcgtattcgaagtatacgcagatgcgaaatgtacaaagctgatcgagacattaagcgcgacagatgagaatggatatgcatattcttccgtttatggagatgacactttaagccatgtatgggtaaaagagcgcagtgataccgtgccgtatggttacaaagtgaaaaatacaccattggaagtaagcgtatcctcggacagcagtggctatatcgagcgaacaattgaaaatacgccgatgaagaaaaagctcatgatagaaaagaaggactcttataccaaaacggctctggcaggtgcaaaatttgcattgtatacagatgaagcatgtaccgaagagtcgatgttgggcgtaccgttatcaacagacgcagatggtacagtcagctttacagatattccggtagcatacgagaaagtatacttaaaggaaatccaggcgccggacggttatgatctggatgaaacaccaagagaagtgacactgactaatgatgtgataacgcagacgattacctgggagaacagcaggaagtggacggcagttaagattcataaagtggatactggaatgaatggaattaacgaggtagaatttgcagtatttgaagattatgaatgtacgaaaacggtagaaggagtcggacctcttgtgacggatagtgaagggtatgcagtatcaattgctttcccatataaacaggacacttattacctaaaggaacttaaagcaccttattatgaaagaaatgtaggaagagtattcccggtaaaagtgcagccattggatgatccaacggatacgtcaggggttccggtgataacaattataaattcgtttactcctacagagattaaagtcacaaagcaagataaggtgacaggaaaaccaattcagggagcggtatttgaaatttattcggataaagacgaaaaatatccgcagggaatcataggaccgacagatgaaaacggtgtggcaaccgcaaaaatcagtttttcctcgtacggtcctcaatattacctgaaagaagtctacgtcccagcaccatacaaactgtcagatgacctgataccggtaacagatggcagagtagaggtaaccgtctacaacgaatccgagccaagcaagatttccctcaccaagacagacgcatcgtcaggcgagaaacttgcaggagcggtcttcggagcctacctgtcagagcaggatgcgaaaaatggcgagaacaagcagtttgaaatcggaccgacatccgccagcggctttgccgtatcaaaagaatttaccgcaaaggcttccacctactacctgaaagagatcaccgcaccaaagggctataccctttcaagtgagatacgtgccgtagacatcgtcgggggcaagatcgttgatgcaggaacatttgaagatcagaaagaggaaaacagtgcttttattgaggtaacaaaagtcagtgcagatgacgcaaacaagaaacttgcaggagcagtctttgctatttacgataacgaagcatgctctggcgagccggtgcagatcatggatccgacggatgtaaatggttacagtaagtcaaaagagctgctagtcacacaagacaccgaattttacctgaaagagatcaccacaccgactggctactaccagttgaagggcagtgtcaaagtaacagcaaagatgaaagccacaacacaggtaacgattcaaaacacaccgatcccgacaacgacagagacagcagagatcaagattaaaaagacggtgacagacacaacggatccgctggcaggagcagtctttggcatttacacagatgagcaatgtcagaatctgtggatggagcttccggcaacggatgacaacggcgaggcagtatcaccgacctttgaactggtaccgggtacagcatactacgtgaaagagatttatgctccggctggttatgaattgagcaatgaagtgacaaccgtgaacgtagtagctggacagaaagagtacgttgtcgagagaaccaacacgccgaagtggacgcagattcaggtaaagaaatacgatgcagaatcgaaaactaagttactggaaggtgcagagtttactgtctatgcagatgtggaatgtaaaacgccattagatacatttaccaccggatcgaatggaataggaacatcaaagaagcttttgatggatcaggatgtattctatgtaaaagagacgaaagcgccggatggttatacagcaaccaatgccgtatggaaagtgactgcagagaaaaataaggtctgcgcaatgctggaagttccgaacgttaaagattcgacgaccgataaatttgtttacgtaaaagtaaagaaagtagaaagtggcacgaataaggcattgcaaggtgcatatttcacagtttacaaggatgcagactgcacaaaaccggtagtcgaagtaggaccgacggacgtcaacggcgaagccgtttccgtacagttcatcaaagaacaggatacctactggatcaaagagagcaaggcaccggacggatatgtattaagtgatcaggtacagcagataacacctggcacagatacagcaaagctgcaagccgttacttttgaaaacagcagacgtcagatcaaaatccgtgtcaataagaccgatgcagaaacggacgaaccactggcaggcgcatattttaaagtgtataagtcgaaggaggatgcggataagcagcagaatgaggtttgcgagatcggaccgactgataaaaatggacaggcagaggcaacaattgattacgagcaggatacttattatctgcgcgagagccaaaagcttgcaggatatgtgaagtctgacagcgttgatacgcttgtgatcacaggcgatacgacagattactatgcaaccaacacaccggaatatacgatgatcggtatccggaaagtagatgcagagactggagctggattggcaggagcagaatttaatatctattcagatccggaatgcacgcaggaatcatttgtcggagtcatcggaccgacgggagatgatggttacgcatacagtggtcagatacgggctggcagcaaaacattttatctgaaagagacaaaggcaccggatggatatccaatgccgtatgacgacgacgtatatggaccggtagagggaaatgcggtcggaaatacgaaaaatcagatttcggcaccatttgaaattgaaaacaagaagatcagtatttcgtttgatatcgagaagaaagatatcaagacaaaagatttgcttgccggtgcaacatttgcgctgtataaagatgcagaatgcacagtgaaagttttagatttcacgccaacaagtgcagatggtgtatttacgtccggaacatttgaagccacacaggaggtttactacatcaaagagacgacggttccgacaggttatcagaagccggatggtccgacagaagtaaatatttacaaacttcttggaatggatgagttagatcggaaagtcacgatcatgaatgtaccggagaacacgaagacgatcaaggtagcagtgaataaaatagatgctgttacagcggagccggttgaaggagcagtatttgcggtctacgaagatgaagagtgtacgaaggagataaccagattaccggagacagaccaaggcggttatgcgcagtcggaggaatttgtatacacaggaagccaggacatctattatctgaaagaagtgggtgcaccaaaatggtatcacgccaataataccgtcattccattcaaggtggaaacaaagacgatttccggcaaagatgagaacggcaattcgacaagtgtaaacatactttatgtagaaccgcagacgatcaaaaacgagccggaaatgacgcagatccaggtgaagaagacagacgctgacaatggagatccattagccggtgcttacttcaaagtctataagacgagggcagatgcagagagtcagcagaacgaagtctgtgagatcggaccgaccggagccgatggaattgcagtatcaaagaagttccaccgtacgcaggacgatgtctactacatcagggagtcaaaagcgccggagggttatgtaatatcagacgtcatccagaaagtgacaacagaggtagatcagatatccaatccagttctttttacagatgaaaaggcaaagacccaaatccagatcaggaagacggcagctaatggcacaacgccattgaagggagcagtatttgaactctatgagacagccgaatgtaccggagaaccgctgctgacattaccggcaaccggaacggacggaatcgcaacgagtgcttctttccagatcacacaggagtggtattacttgaaagaaaaaaccgcgccggcgggatatgaagtcagcacgacagtcattccagtaaaactggaaaacggagcgacactgacagtcggaccgattttaaatggaacagcgggtgacatggcagagatccacatcttaaagaaagaagctggcagcgacaaagttttagcaggcgctgtatatggaatctatccatcgagggactgcaaagcaggaaccgagattggaatgatcggaccgaccaatacggatggaaaggcagattccggaaaatttgtaaagaaacagaatagttactacctgaaagagcttcaggcgccggagggctatgagtgctcagataccgttacagaagttaatctggacaacggagagggtagagcaggaaatccggtaacactgtatgatacacagaagaagtcgaagattcagatttacaaatatcagacgacgacaggaagcccgttgcgtggcattacatttacggtctatacggatgaggaatgcaccaaaccgtttacagatgtcagcaccgcagcaaatggaaccctgacgaccggagatgacggatatgcagtttcaaaagaatttgttccaacacaggaaatttattacataaaagagacggcagtaccacaggattattcctttacactgccagataccgtatgggagatttccgtgacggctggagaaaccgcagagatacagatcgcaaacggtgctcttgcaaagatctatgtgagaaaaacagcaaaggatgatccgaataccacactttccggtgcagaatttgatatctacaaagatttcgaatgtacgatgaaagtgggaagcgtaggaccgacagataaattaggcgaggctgtttccacaagctttacaaaggagcaggacatctactacctgaaagaaacaaaggcaccggacggctataaactgagacaggaaccgatcgcagtaacggtaacgaatcctgacgatgacagcagcaagataaactggaatgttgtggaagatgaaaaactcgaaggaagcattaccgttaagaaattagaccgcaacgaaaaaccgttgcagggagccggattccagttggaagttttcaatggcggaagctggagcacggcggtgggaaataaggaaaccgatgcagacggtattgtaaaatttgaacatctggaaccgggcagataccggctgacagaaataaaagcaccgcagggcttcaacctgttaaattcttcacgggagatcacgattccgtacgagatgaatgtcgcagatgtgacagagacaccgacaggctacacggagacgaaaggtgataagatatatttctacgatatcacgctgacgttctacaattcgcttccgttcaatgtcccggtgacaggcggttcgggcaattttggagcagccacaatcggcatcctgcttatggcaggcacagccgcatgtgcactgctcgcagagaaacgccggaaaaagaagagaagagccagctaatctctggctcttccaaaaaggaataattagagcaatccatttatcaataaaaaacatataacaaatatacgaaaaggagaatgagatatgaagaacaaaaacgtagtgaaaaaaatcactgccatactggcaactgcctgcatgatggtcggcatgcttgcaacaacagcgatggcaaaaccagcagcagagcaaacaacaggaagtctgacgattaagacaagcacagatcagtcaaacttaaaggactatgagtttgatctgtataaggttgctgacattacagttgatgcgaatggaagtatgacttataaagcaacaactgaatatgagagtattttaagaactatagatttagaagatcagactgaagttgagaaaaacttaacagctttatctacagtaaataataacaacgtaataagacatgtaaaaggtaatgaaagtcaaactgaaataacgattagcggtcttgcacttggctattaccttgtaaaagtaacagctccagaaggtgcagcagcaacaaaagatttcttagtatcagtaccatcaacaaaaacagatggatcaaatctggactatactccgatagtaacattaaagacatcaactgtagatgctaccaagaaaggtaatatcttagataaagacggtaaagcgacagagcatagaagtggtaacattggagatacaattaaatacacaatcgaaacacatgtaccagatacaacaggatttgttgaatacacatacactattaatgatacgatgagcaaaggcttacagtataagaatggctcattatctgtatctatgggagaaacaggaaatacaacaacaatagctgcctctaactataatttgacaacaactacaggtgaaaatggtactacagttattacacttgcatttaataaaacattgtttgtagatgctgcgactagaaaaaataatagtacttacaaagcaggaacacctttacatgtcacatacgaagcaacaattacgaaagacgcacttgacaataattcaactgtaacgaataacgcaaaattgatttatagtaacaatccaggtactgatggaataggaacaacaggagaaattccaacgaatgaagtaaaacattatacatatcatatccagttaaataaatcatttgatgttgaaggcggaaaaggtaattattcaaaagtaagatttacaattgataatgtgacattaagtgagaaaacaatcggtactccaggagaatatgttgtagatccaaaaggtacagtaactaacttgagtctggatccaaacaatggaacattaaagatttatggtcttgctgaaggtgaatactacctgacagagacagcaacagcagatggttataacttattaagcaataaggtaaaagtggtcattaaagctaactatgattccaatggaaccctgattgatagtgatagcaatacagttaatgtaaagacacattttgttgatacgagcgtagtcaacaaaaaaggtttcactctcccatccactggtggacagggcatggtagcacttgtagcagcaggtatctgcctcatgacattaatggcagcactgatggcactttacatgaaaaaacatcggaatgcataaataatgaaaaaatggatatttcccctgctgttaggacttggatttttgctgggacttgggatcacattttatccggcggtgagcaactacctgctggagagaaaccagagtgttgccatgcagggctacatagaggagcaggaaaaagttccggatgaagtcagtgaggagctgaaagaagaagcaagggcatacaacaaaaagttacgggaagggactgtcgtactgacagatcccttcgatccggacgctttgaaatatgtgacggacgattacgagaagatgctcgatacggatggaagcgggcggatgggatatcttgagatcccatccatcgaagtgtatctcccgatttatcacggaacgagtgaaggcgtgttacagtccgggattggacatcttggaaacacatcgcttccgatcggcggagaaaatacacatgctgttttatccgggcataccggactcccgaatgcacgtcttctgacagatcttgacaagctgcaggagggagaccagttttacattcatgtgttagatgagatactggcttacgaagtagaccagatcaaagtggtagaaccggatgatatcagtgatattttcattgaagagggagaagattatgtgacgctggtaacatgtaccccgtacggcatcaactcccatcgtctgttagtcagagggacaagagtcccatatacagaagaaaaaaaagaacatcaggtcaaacgtcaggaagaaagcacctggaagcaggcatacaaggaagcaattgcagagggcgtgaaatggacgctcgtcggacttgcaatcctggcagtcttagcaggcgcaggacacctgatcggtaaggcaaagaaaaaatcggataagaaaaagaaaggaggaagcagcgcatgaaaaaaacagcgaaaaatgtgttgggtttatttttctgcattctgatgatcagtatgtgtacaggcacaattcctgcttttgcagcttcttccggaatgatacatatccagttagaagatcttgatagtgacagttcagataaaaaaggcgtaagctttgagctgtactgtgtaggaaccgtaggggactctggcgagccggtatttgacacaaaatacaatattacggcttacccgaagacggcagaagagacagagcaggtgatacagcagataagcacagctctggacattgacgcacaggaaactgcggttacagatgaaaacggagaggccgttttccgcggtctggcagatggcatatattacatcaaagcagtcaatgcaaaaggctacggcacagtggagccagttttggtacatctcccgttttccagtgccggaaccggtgcaggcagtcggttagagtatgaagtatatgcgaaaccgaaagcatctgccagtccatctaccccggacaaaccgacagatcccgtaaaaccggatcagccgaagcagccaaacaatgagaaaagcaatccggaaaccagcgatggaaccagcagcaatacgagtaacatagcaccgctgttcggaccgaaaaccggtgacagcaccccgatcgcaggtgcattgctcttacttgcagcaggcatcgcactcattgccggggctgttgtccgaaaaagaaaacagaaatagtgcaaacaggcgacactcaacttcggttgggtgtcgtctgttttttgtgttatgggctttagcctgttgagtccattggagtttttcgttgatccgaaaaatgtagatggacgaaacaataaaccacccgctatgcgggtgcgcgtcgattgttatacaaaaaaattacctttccgtgtacaataaagttgttcaggctatattgtagaaaggaaaggtaatttatggcgaagaaagaatattcactcgcacatacaaaatggatgtgcaaatatcatatcgtcttcacaccaaagtatagacgaaaagtaatttacaatcaatacaaagaggatatcagagatatcataaaacaattgtgcagttataaaggtgttgaaattattgaaggacatctaatgccagatcatatccatatgttagtaagtattccgccaaagataagcgtatcatcatttatgggcagaagggtattatgttagcacagtaggattaaatgaggcaacaataaagaaatatatccaggaacaagaaaagcacgatatagcaatggataagttaagtgtaaaagaatatgaagacccttttaagggttaatgccaagtagtaacaatgccccttaaggggtagcgacgagtcaagagcaatatggcttgaacggagctgtgggaaggctgtgtaaacagaattcccatagcctaaagagagagccagcgccttgagacgctggcctagtaataagggcttatagccctagagcaaaccacccgttggacgggtgctcctaaagctcttccaaagatatcctgttatacacactcttatgaaaagcggcagcaacttcgagttccccataactgctttcttcaaaatcataactatcttgaaaagcagtggtgagaagggctctgaattcctcgccttctttgctgtccagataatctttaagcatcatacagcacgcatgaatattattgtaatatttctgataatctggatgaaactcaagcagcaaatggctggccgaaaatgcaaacagagtggtagggcgaatcagcggacgatacagtaaccgccatttttttatttgcatttcatccgttgcaaagagtgtgagagacgtcttcaattcttccacaaaatcaggatagtcttccggtgtgagtgcaataattttctggttgcgcaggtattgatttacattggcggcatctaattgttccggggaaagagcctgtaggtattgcaccataacttttaaatcggaatcgatatgttccaatgtagtctgcatgattttctgccagagaaactggcgatattctgtcattggtgcatcaataaaagattgccagagataacgggcaatcaatcttgcatcacgtgaagtatattgtgcatgatatttgctgaagtccggtttgaattcaattccttccagatgctcggaaagctgctcaaaggaatggcagaccggaagtgaggttgaaaattcatccagacttttgattgtctcttcggtagtaagcagctgtgtctgaagctgatgaagctgcttgtggagatagtaaggagctgttcttggatttgataagattgaacgaatatcggcaagcggaagcccggcatctcttagtttccgaatcatgataaagcgggaaacatcatcttctgaaaaatcgtgataaccattttcctgatttgaagccggtgtaactaattgttcttttatataaaagtagattgttcttttctgaagctttgttcttttgacaacttcctggattctcatatacttctcctaacatgtgaaaggtttatctcagtcgagaagactcccacctctttcaggtggtgagtaacagctcgacttgaaaactataacttatacgatttaaagcgtacaccaagtgtacacttttcttcctattataagatattttgagaggaaaatctatgaaaaactagaaaaagtgacaaagaaaaggaaaaaacgagacaaaagcggggagtgttttgtgaataatttaacgttgactttccaccaactgtagattgtatagttgaagcaagaggtgaacaagttcacgacaactcagaaaattgtttcagagtatggagagtgaaaaaagttcgcagaaaaggagaaaaacaatatgtttgaaaaattattcagcccaatcaaaatccgtgggatggaactgaaaaacagagtcatgctcccggctatgggaacaaaattttcaggaaaagcaagctatgtaacagatcagctgattgactatcatgtagcacgtgtcaaaggtggatgcggtttaaatatggtggaagtctgttcatacaccaagtgcaccgagaggatttctttctattagtgaggacgagtatgttccgggacttaagaaactgacagatgcgattcatgcagaaggtggtaaagcaggtatccagctgtggcagggaagtatggcagtcggaatggaccagacagcacaaattttgatggccagtgatatgccgatgggacctggaatcacacttcctggaattacagtagagcagattaaagaagttgtagattgctatggaaaagcagcaaaacgtgcagcagaagcaggatttgactgcatcgaattccattgtgcgcataactatttgcctcattctttcctttccagtggaatcaaccacagaacagatgagtatggcggaagctttgaaaacagaagtagattcccactggagtgtatccgtgcgatccgcgagaatatgccggaagatatgccgctgtttatgagaattgatgcacatgatgattatctggaaaatggacttacaatcgaagaagtaattgacttctgcaaacttgcaaaagaagcaggtgttgatacacttgacgtatccagaggaaatattctttcagcaggtctcaaatacgaggtaccttctattgatattccaagagcatttaacattgacaatgctgcaaagatccgtaaggaaacaggaatgttgacaatcggtgtcggaagaatcaatacaccacagcttgcagaacagattttggaagatgacaaggtagatatggttgtgattggacgtggacagcttgtagatcctgatttctgtaacaaggcagaagccggaaaaacagaagaaatcgactactgtgttggatgtaaccagggatgctatgatggatttgagagcaaagattctccgtgcatcacttgtcttcgtaacccggcagtcggaagagagaaagaatgtgaactcattccggcagagaaaccagagaaagttctgatcgctggtggtggaatcggtggacttgaagcagctatcattctgaagaagagaggacataacccgatcctttgtgaggcaacagacacacttggcggacagtttctgacagcaggagaagctccgagaaaagcagagatgaaagcagcagttctgtctatggcagagaaggcaaaacgtcttggagttgacattcgtatgaatacaaaggtaactccagaaatgattgcagatatcaaaccacatacatttatcaatgcaatcggcgcagcaccgatcgtgcctccaattccgggaaatgataaagcgtttgttgtagattctcatgcagttcttaacggcgaagcaaaggcagaaggaaatgttgtagtcatcggcggcggaatggtcggcatggaagttgcagagtatctttcagaaaaaggtgctaaggttacagtgcttgagatgatgaaagaattctgtgcagatatgggaagcacaagaaaaatctgtgtaacagagcaggtttatcaggatggaatcactccggtaacagaagtgaaagtaacagagatccaggacggcaaagtcattggtgaaaaagatggagaaaaagttgaattcccatgtgattacgcagtgatggctgtcggagcaagaaaacgtgacggaagcgcattagaaaaaatgtgtaatgatcttgaaatcggttactatgagattggtgatgcaggaatggcaagacgtgcacttaacgcagtaagagaagcatttgacgcggcacttaactttgataaagaggaagagtataagtatgtgagcaagccgaaaaaggtcgtatttattacaggtgcaacaggaacaatgggacaggagacaatgaagcagctcttatccagaaacaaccgttttaagacaagaatccttgcaagaccatcagagaaaaaccgtcagcttctgaagaaatatatgtgtccgtcactggaagttgtctggggcgatatggtagattatgacacgatcaagaaatgtgtagacggagcagattatgtacttcatatcggtgcaatggtatctcctgcagctgataaatatccggagaagacattgtatacaaacatcggttctacattaaatatcatcaaggcaatcaaagaacagccggatccggacaaagtacattttgcatatgtcggaacagttgcgatgacaggaagcagacttgaaccggtacagtttggtcgaatcggagacccgatgaatccgtctatccatgattactatgcagtatcaaaagtattttcagaggcagcggtctttgaaagtggactgaaatactgggtttccatccgtcagacaggacagcacccaagcgcagagggcgctggagaagagccaatcgtcttccatcagccggcgaacaacgtactggagtggagtacagcacttgattccggtatctgtatggcaaacctttgcgaagactgggttgatgagagtttctggcgtaaagcatacaatttaagttctggtaaggattatcgtctggcaacctgggagatggcaggactttcactggagccaatgggaatcaaatatgaagatgtttatgatccacaggatgtggcaagattcaacttccacggacagtattacctggatgctgacaaactggaagagcagcttcatttccgtcagatgccggctaagatttactggggtgctgttaagaatgagatggaaagaatgatggcaaacccaatgattgcagctatgatgccgacagctgaagcaatgcatgcacacaataaggaaattgcagcaaagaagacaggtacagtctggatggaagagaacatggagatggattggattaagggcattctttggttctttggaagaaaaacagaatgcgaaaccgtttgaactctaccacccggcagaagaaccggaaagaccgctggatcatggttatgacgaagaaaagggaattgagaatctggatgtaaatgatcttgagaaggcagcgcagttccgtggaggttcttatgaagaagaccatgcaggagatatttatacaccggttgagtggaagtgtgcatccggacataaattcaaaatgtctgtcaatgcagttcttcacggtggtcactggtgtccggaatgtatgaagaattcctgggcttatccaaagatggcgaaagagaatccattctacgcacaggtatggaatccacagcacagcccggaggaagattatgaaatcccaatgcagttcagtgcatatgacatcgagaaagaactggaagaaaaactgggtctttaataacagatacaattgcatgattttatctagaatgaaagaggaggactttgataatggaattattgaaggaaaaagtagcggtagttacaggcggaacccgtggaatcggatacgcaacagtgaaaaagtttcttgaaaatggagcgaaggttgtattattcggatccagacaggagacagttgataaggcactcgcttctttgaaagaagagaatccggcatgggaagtaagcggagcgtgcccggatttgtgtaatgcagaagcagttacagaagaaattaacaagattaaagaagagtttggaagaatcgatattcttgtaaataacgcaggaatttctgatagcacaccgatcgacaattacacatctgaaagatttgaccaggtgatgcagctgaatgtaaatgcggttatgaatggtgtcatgccgacagttgcagttatgaaagaacagggcggcggagttattttaaatacaagctctatggtcagcatctgcggacagccgggtggagtagcttatccggcaagtaaatatgctgtaaatggtctgacatggtcactggcaagagaacttggaccatttaacattcgtgtaaatgcagtagcacctggaattacaaagacagatatggtcgctgcacttccggatgaagtgatccagccaatgataaatgcaataccgcttcggcgtatcggagaatctgaggatattgcaaatgcattcctttatctggcaagtgatatggcttcttatgttacaggtgagatcctttccgttgatggagcaatgagaacttgatctagtctttgagtcttttgcgttactgtttgcaggttacctgtgaacagtaactctttggcagaattgccgagaaacatggggacagtggaaagaaccactgtccctttattgttgaaatatattttggaaaaagcatatgtttattcgatcttattctcatttctccaatttcttggtgacatcccatagacatttttgaatgcacgtgaaaaatgcaactgattcggataccctacggcattcccaatatctgcaattgacagtgaagtgatcttcaaaagctctgcagccttagtcatacgataactgatcaggaattcctgtggagaacgtccaatcgtatcgtgaaaaatctttccgaaataacttcgattcaatccgcagaatgcggaaatatcttctacagaaatatcattctgaaaattctgttcaatgtacgaaagagcttctttaatataaaaatcccggatacttccgttttgcttcacatgaactgttgcggcagaacgcatgaaataatctaaaaacagatagagatgtccaattagatgaaacggagattcttcgggatgacggctcagataaagcatttcttccatcatctggttgcgaagttcctttgaacttgcatgataaatgggatgattcaggctcagacctgcggttgtgacaatctcgcgggcccgaagaccgtcgaattctacccacgtatattcccacggaagcttagaatcagcaacataagtattgacctgtcccggaaaaagcatgaagccctgtccgctttttacctgccaagtgatggtgtttccgttttcatcatctgcaagtaatgttcctgttccggaaatcacataatggaaaatgtaatgatttcttgctgcaggaccgaacgagtgagccggtgcacattgttcccatccatattgatataatcccagatcaacaaaattttcatttggaaatacagaaaaaagtaagtcgctcatataaatcacctctgatagcattatatatcaaaatgctagatgacttcaatatatgaatgaaaaaattgcattttgctataaaactaaaaaaactctgatatttatagtggcataaagatatgttagaatatgattatcaaatagatgacctgagtgaaatgacaaaaatattccggaatgtgtcaaaatgaaaggtgtatggtagaaggaaggagtaaggaaatgtataagaagagcaatcgaatcatttgcatgggattgatgctttgtatgacttcggcaatggtactcggaggttgcggacagaagagtgaaaatagcggaaagatagaaatcgagcttgtacagtataaaccggaggcagtaaaaacctttgaaaagattgaagaagaattcaatgcaactcatgatgatattcatttgacgatcgaatctccaaacgatgcaatgacagtacttaaaacacgttttatcagagaagacgctccggatattatcggaatcggtggagatgtcaatttctctaactttattgattctgatatgctgatggatatttcagattatgaaggactggattctattaaacaggcttatctggatatagataaagcgttggaatttgtacctgaggacggtgtgtatgccgttccatatgtggcaaatgcagcaggagttctgtacaacagagcaatgtttgaggaatatggctgggaaattccggaaacctgggatgaatttatagccctctgtgaacagatccagagtgaaggaatccagccattgtattttggatttaaagatacatggacttgtcttgcaccgtggaatgcgatcgccgttgatcttgcaccggcagatgtctgcagccaggtgaacaaaggagagacaacattttcaaatgagtacagagaagtggcagagaagattaaagctctgcttgcatatggaccgaaagatcctttcgcttatgattacaatggagcatgtacagcatttgcaaacggagaatctgcaatgtacacgatcggaagttatgcaatcccacagattcagacagtaaatccagatatggatatcgattcctttgtaatgccggctaataatgatgcatcagagaacaagctgaactctggtgtggatcttcagttcagtgttatgaaagattgtgagaacaaagaggcagcgtatgaagtgcttgatttccttttgaaagatgaaaatgtacagagttatctggatgaacagaaagcggttccttgtaaggaaggagattttgaacttgcttcaacacttgatggagtgaaatctttcatagaagaaggaagaatggcagattaccaggatcattactatccttcagagatgtcagttgatgcacagatccagacatttcttatgaaaggggatgtggatgcattcttaacaaagtttgatacagactggaagagatataaccgtgatatcatccgcaaagtggaagattacgagaaagagcatgcggacgaagattaaggaaggggaattcaagcatgggaaagaaatcaatgagtggaagaaaaatgacctttcttctgataacaattccgatcgtggcactgtttttctgttttaatacattgccattgatcaaaggtgtgatttacagttttacgaatttcaaaggttatggaagctttgactgggtaggacttagaaattatcaggatctttttacagacagcagagtcggaggttcttatctgtttacatttaaacttgcaattgtagctacgattgtgacaaatgtaatcagtttgatccttgcacttggactgaatagtaagattaaattcaagagtgcgtttcgtggtgcctactttattccaaatgttctcggagcgttggttgtaggatacattttcaattacttttttacatacattcttccggctttcggagaaatgcttggaagcaagaccttttcttccagtatgctgtctagtacaaaactggcatggatcgcagttgtaatcgtgtgtgcatggcagtcgattgcgatgaatacaattatttatatttcaggactgcagacagttccggaggatgtttacgaagcaggagcgattgacggtgcaacaggatggaataagttcagacatctgacattccctctcattattccattctttagcataaatatggtactctgtgtgaaaaacttcctgatggtatttgatcagatcatggcgttgaccaaaggaggtccggcacagagtacagaatccatttcttatctgatttataacaatggtatgagtggcggtcagtttggattccagagtgcaaacgcagtgatattctttatcgttattgttgtaatttctgtattacagatgacaatcacagggaaaaaggaggaacagctgtaatggaaaaaatgaaaataaaagaacgagtaaactggcctgtaacgattttacttttacttggtctgattacggttgcttttccactgtatatgacaatcgtaattgcactgaagaagccttctgagatgacgaatagtatcagcggaatcctttccttgccaagtcatttgagccttgataattttgctgaggcaatgagagtgacagatttctggcattctctcggaaacagtgtatttattacacttgtaacagttgtcctttcaattctgattcattcactgttggggtatgcaatcggaagaaataagaagagtaaattttacaaattcatttatttctatgttgtcagcggaatgtttgtgccatttgcaattctgatgatgcctgttgtaaaacagacggcgcagatgggactggcaaacagagcaggagttattattctgtacgttgtattttatatgccaatgaatgtactgctttattccggatatcttacaaatatcccgttggcattggaagaagcagcctgtgtggatggtgcgagtacatggaaaacatattggaagattgttttcccaatcatgaaaccaatgcatgcgacagttgcagttctgacagcacttggtacatggaacgatgtaatgacaccacttgtgatcatgtccggttcaggaagcggaaatacacttccgctggcacagttaaacttccagacacagtttggaacaaattataatctggcatttgcctcctatctgttggcattgcttccgattctgatcttctatctgatctgtcagaagcatatcctcaacggagttgttaatggagcagtgaaataataaaaagtaaaagatagcgaagcgagaacagacagtaatgcagatcttgcttcgctaaaatggaaaacaggagtatttagatatgggaattatatattgcgagaaagacagaacatttactttacagacaaaaaatacaacatatcagatgcaggtggatcgctatggatttttgttacatctatattacgggaagaaaaccgatgaatgtatggactatcttctgacatattatgacaggggattttcgggaaatccatatgatgcaggagaagatcgtacgtattcaatggatacacttccacaggaatttccttgttacgggaacggggatttcagaagtacagcatttgcagtagaaaatgcagatggaagtatgagttgcgaccttcgttacaagagtcataaaatctttgatggaaaatataatctgcaaggacttccggcagtttatgcaagtgataaggaagcacagacactggaaatcttaatggaagatccagtgacaggagttaaggcggtgcttctttatggagtgctttccgcacaggatattattacaagaagtgtaagtgtgaaaaatgaaagcagtggcaaaatctatttaaacaaaattgagtcagcaagtctggatttcctttacggagattatgagtttctaacattttatggtagacatgcgatggagcgaaatgttcagagagttccggttgtgcatggaacacagaaaatcggaagtgtcagaggaacctccagtcatcagtacaatccgatgatgatccttgcagaaaaagaaacgacagaagacaaaggaaattgttttgcaatgtcctttgtatacagtggatgtttccagggagaagtgttgaaagatcagttaaaccagacaagaatgatgctaggacttcaggaagaagcttttcgttatccgttggaaacaggagaaatgttccaggctccggaagtgattttatcctattcctcagaaggaatgaatcgtttgtctcagaatctgcatcattgtatcagacaacatatctgcagaggcaaatataaagaagaaattcgtccaatcttgatcaatagctgggaagcagcttatttcgattttaccggagatacaatctatgagcttgccaaagcggcgaaggaagtcaatattgacatgcttgttatggatgatggttggtttggaaaacgtgatgatgataatagcggactgggtgactggtttgtgaatgagaagaaactaggtggcacacttggaaatctgatcaagagaattaatgatctgggtgtgaagtttggtatctggatcgagccggaaatggtttcagaagacagtgatctttatcggaaacacccagactgggcattgacggttccgggtagaaatccggtcagaagcagaaatcagcttgtattggatttctcaagaaaagaagttgtagatgaaatttatgatcagatttgcaaggtgttggatcaggggaatatcgaatatgtaaaatgggatatgaatcgaagcctgatggatgtttattcttctgtaacaagagatcagggaagagtgttacatgattatgtattgggactatatgattttctggaacgtcttgtgcagagatatccgaatctgctgatcgaaggctgcagcggtggaggtggaagatttgatgccggtatgatgtattacactccgcagatctggtgtagtgataatacggatgcaattgacagattacggatccagtatggaacatcctttggttatccggtatcggtagtaggttctcatgtgtcagcagtgccgaatcatcagacgggaagaaagaccccacttcatacaagaggtgttgttgcaatgtccggaacttttggatacgagctgaatcttatgaaactttctgaagaagaaaagcaggagatcagagagcaaatcgcagaatataagagctatgcgtcgattattcagaacggattgtactatcgtctctcaaatccgacaacagaagaaatctgcgcatgggagtttgtgcatacagatgagaaagaacaaagtaaagttcttttaaatatagttatgcaggtgattcatggaaatatgacagtaaattatgtaaaacttcaagggcttgaagaaacagctgtatatcgagaagaaaagagtggaaaaagatacaccggagctgcacttatgtatggcggcatgccgcttccgatagagccgggcgaatatcaggcatatcagtattgttttgtgaaagagtaaaataaattggttgacgatggaacagaaaatggtgaagaatgtgaataatacagaaaaaatctttgcacagcgtatggaaaaacatcaggatgaattacgctggctttacatggagttgtatggaaatgatgcaatgtatgcagaactttgtgagcagatgcatgattactacttgaagcgtagcacagagttgaaaaaaagagatattaagaaagaaaagaatcctgactggtttaaggaaaaagaaatgcttggcatgatgttgtacattgacaactttgccggtaatctgaaaggtgtagaaaaaaagttagcttatctgaaagagtgtaatgtaaattgtcttcatcttatgccttttctggatactccgaaaggaaaatcagacggtggatatgcagtggcagattttcggaaagtaagaccggatcttggtacaatgaaagatcttgccagattgacagaaaaatgtcatgaaaatggtatgaatgtatgcatggatttcgtgatgaatcatacttctgaggaacatgagtgggcaaaacgtgcacgagcaggcgaaggagaatacatgagccgttatttcttctatgataacggtgatattccggcgagatacgaagaaactgttccacaggtatttcctacaactgcaccgggaaatttcacatggcttccggaaatcgggcattatgtgcttacgacgttttatccatatcagtgggatttaaattaccgtaatccaagagtatttaatgaaatgatgtataactttctttttcttgcgaatcagggaatggatattatccgtatcgatgcagttccttacatctggaaagagttaggaacaagctgcagaaatctgaaagaagtacatacgattgtcagaatgatgcgtatgattgcagaaattgtctgtccgagcgtgatacttcttggcgaagtggttatggagccggaaaaggtggtgccgtactttggtacagttgaaaaaccggaatgtcatatgctctataatgtgacaacaatggcgacgacctggaatagtattgcgacaagagacatccggcttttgaagaaacagatggatatagttagccgtttgccaaagcaatatacatttttgaattaccttcgttgtcacgatgatatcgggtgggggcttgattttgatacaatgaaacaatggggaatggaagagccttctcataagcgttatctgaatgattattttaccggaaagatagcagacagcatcagccgtggcgagttatataacgatgatcctgtaactcaagatgcacgattttgtggaacaacagcatccatgtgcggaattgaagcagcgggatttgaaggaaatgcagaaaaaatgcaggtggcaattcaagaagatctcatgctccaagcttacatgttgacacagtcgggaattccgatgctttacagtggtgatgagttaggacaggtaaatgattatagttataaagatgatgctgaaaaagcatctgattcacgttatctccacagaggagcattcctgtgggaactcgcggataagagaaaagatctttctactgtacagggacaattgttccagatgttgaaccgattggaacagatccgaagacaggaaaatgtcttttcccaggaagcagaagtatatacatatgatgttcacaatgacagtattttaggaatcctcagagagtataagggagaacgatttattgcactgtttaatttcagcgaaagtgaacagactgcgtggatgcaggaagaaggcattttcagaaatctggtgaatggtgaaattgtagaagtgaaagatccagttttgaaaggctatgaatttgtttggatgaaatataaagcataaaacaaaatgtaaaatatagataaaaagattgaaatactgaaagaagaattgtataattttacctataacaacaaaggaggatctttgaaatggatcgtttgaaaggtaaagtagctattattacaggaggtaactcaggagttggagaagcaacagcaaagatgttcgccaaagagggcgcaactgttgttatcacagcgagaagagaggctgcactggagaaagtagcagaagagattaaggcagcaggaggagaagttttcgctgtttcaacagatatctcaaagaagggagatccggagcgactgatggatctcgtgatcgagaaatatggcaaggtagacattcttgtgaataatgcaggaattcttgaggaaggactgaaaccaatcgatcgattctcagacgaagatcttgatcgtatcgtagagacgaacgaaaaaggaactatgcgttgcatgcgtgctgcatcacagaagatgcaggcaggagcatctatcgtaaatgttgcttctatcgctggagtgaaaggatgtggcggagctgcttatgtagcatctaaagcagcaatcgtaggagtgacaaagcatacagcacttcgtttccaggcaacaggaatccgttgtaatgcaatctgcccgggaaatatcattacaccaatgacatcaggaacaaatccggcagcacttgacccggatatgattggtgcaatgtcaacacacagtaatcttagaacaccatcttgtacagcagaagatgtagcaaatgtaatcctgttctttgcaagcgatgaatcaaaggcaattacaggacaggcagtcgtaacagatttcggagctatgctgtaaggaaaataagatagcaactatttaaaaaggacagaaaggttaacaaaacgaaacctttctgtccttctttgtatataaataaaaaagaatgttgcaaaatgaaacataaaagcgtatactaaaagaaaaaaagcggtgattctatgaaaacaaaatttaacgagtatttgacaaaattacgtaaatcccgggtctacactcaggcgcagatggcagaaaaattggggatttccagatcgacttataccaattatgagaatggaaaccggacaccggactttgaagtactggaacgaataagtgaggtgttagcctgttccttagatgaattatttggaagaaaaccaacttatgttgcaagttgtgacgcggtaaaggaagacagcattctgtacaatgtatctgggatacaagaggaaaaacctaaacttgcaataggagtacaggactttcgcgatttgcgtgaaaaacaagcctattatgtggacaaaacacagtttattgaacagtttttagaatcctggtatcagattacattaattacaagaccgagaaggttcggtaagacacttaatatgtcaatgttggcagaatttcttgactgcacaaaagattcctccgatttattttgtggaacaaagattacaaaatctgtccactacaaggagctcaatcgatatcctgttgtatttttgtctttccttaacgtgaaagcgggggatgcagaatctttgtgttatgcattgaaagatactgtacgtgcggagtatgagcgcttttatcagatggttaatgatggaagactgtcagaattccaggtgaaagaattcaatatgatttataatagtttatgtcaggaaagcatcggaaaagaaatagaaaatcatgtgattcgttcaatcgctgttctttgtcaggtactgagtgcgtattatggggaaaaagtatttttactgttagatgaatatgatactccgtttatgtctgcaaattccgaaggatattatgatgaagtaagagccatgttgaatcgttttctggcaacatctctgaaaggcaacgattatcttcaaaaggcaattctgacaggaattcagagaattgcgaaggaaaatatattttcgggtctcaataatttagttgtctgcacagtgcaggacgaagattatgatgactgttttggttttacagagcaagaagtaaaagagctgcttgcttattgtaaagcagaattttcagatgagctgaaaaagatgtacgatggatatcattttggcagtacagatgtatataatccatggtcaatatcgtgttatgcggcaagaagaaggatggattcttattgggttaatacaagcgaaaacagtattttacgtaatgcacttgaagtacagggaaggtcttttgagaaagaatatgaggccttggtcacagaaggtgaagtagaagtgatagtagatttttcaatggcttattatgaaaaaatggacgaagcaaatctatggggacttcttgtaaatgccggaattgtaacaattacaaaagaaatcgaagaggactattaccgacttcgggttcctaatctggaagtgtggaaagtgttcaaagaattaacagcatgtcatctgaaaatcgatgagagacatatggaaaagatgttaaatgctcttaaaagaaaggatatggaacgttttgcagaagagtatcagagagttcttttggaattgccatcttatcatgatctgaaagatgagaatagttaccatatgatgacgcttggaatgtgtgcatttcttagaaaggattatgatatcaaaagcaatcgggaaaccggagaaggcagaagtgatatctgtctttatgcaaaacatgacagatatccaaatttaattttggaattcaagtataccaaagatgaaaaagacgatttagaaaagcttgcagaaaaggcactggaacagataaaggaaaaacaatatgacgcagagatgaccggagaagtgtgttatgttggactggcacattgtgggaaaagagttactgttcactcccgtgtcaatcactccgctgattgacacggaggatgcatgttttggcttgaatgcatctcgccccatcgccaaaggcgatttaaaatggcgagatgcgttgctggtcgcacattgtgtgaacagtaacggaaaagatcttgtataagatggagaaaaaacggttgacatctatcagacaagcttttatactaatcatgtgaagaaaacacggggagcttgtgtaccaggctgagaggaagttgagaacttcgacccataacctgatttggataatgccaacgtaggaatgtataaagcagtactttagagagatacatttgttggtatctctcttttttactaatcaggcaaaattgaagattggagtaagttgagattgagcgagagttcatgaaggggtgcaccaccacgggtacatttctttcgtgaactcttttttcaattatccggaaaggagtagttatgattacagtaaatggaaagcagatccagctgacatctgaaatgagtgttgctgattatctggagcagaacaattaccagattaatagaatcgcagttgaaatgaatgaagaaattcttccgaaatacagctattcagagacaatgctcaaagacggtgaccgtctggaggttgtgacatttgtaggaggaggctgatatcagatggcatcagaaagaatattaagcaaagaagaaatcgaaacagcgctgaatgaacgccattcgccggaaaaacagaagcttttatcagccggtcaggtgacgattgccggacttggtggactaggttctaatgtagcgtattcacttgcacgaattggagtagggcatctgcatctgattgattttgatgtggtggatattaccaatttgaatcggcagcagtatttcatggagcatatcggaatgtataagaccgatgcgctaaagtcactgcttttaaagatcaatccatatctggatattcgtacagattgtgtgaaggtgacagaagagaatttgaaagaactgtttgcggatgctcagattgtctgtgaagcatttgataatccggtagcaaaagcaatgctggtgaatggaattctggagcattttccggagaagaagcttgtgtctgcaacaggtatggcaggctatgaaagcagcaatataatcagtactaagagaatgatgaagaacttttatttatgtggagatcgtgtgacagagccgacttatgggaatggattaatggctccacgagttgcaatctgcgcagggcatgaagcaaatatgatcacgcgtttgcttcttggagaagaggatgtatagaaagacatctaaatgaataaaaaagaaagaaggatttaagttatgaatcagaaagatacatttacacttggaggaaaagaatttagttcacgttttattctgggatcaggaaaattttcgcttgatcttgtgaaagcatgtgtagaaaaagcaggagcgcagatcattacacttgcgcttcgtcgtgcaaatgaaggaggacttgcgaatattttggattatattccggaaaatgtaacacttcttccgaatacatcaggagcaagaaatgcagaggaagcagttcgtattgcaagactttccagagaagttggttgtggtaactttgtaaaaatcgaagttgtcagagattccaaatatcttcttcctgacaactatgagacaatcaaggcaacagaaattcttgcaaaagaaggctttgtagttatgccatatatgtatccggatctgaatgcggcaagagatctggtgaatgcaggggctgcctgtgtaatgccacttggggcaccgattggttctaacaaaggactttgtacaaaagacttcatccagattttgattgatgagattgatctgccgattattgtagatgcaggaatcggacgtccatctcaggcatgcgaggcaatggaaatgggagcggcagctgttatggcgaatacagcaatcgcaacagcaggaaatgtcgaggagatggctgaggcattcaagaaagcaattgaagcaggaagaagtgcttatctttcaggtcttggaagaacaattgaacgaggtgcaagtgcatcttcaccattgacaggatttctggaagactaggaggcagttgagatgaatgatacacatgttaatgaaagtattttaagtgaagaaatactggaagatcagaagaaaaacagaatcgatcatatgacatatcttccgggaatggaggatatcggatcagaaatcatggatcaggtgatcgaggcaatggaagcctatgattatagtaaatatacggcagcagatgtgaaaaatgcacttgcacattcggaacgtactccggaggatttccgtgcgctgttatcaccggcagcccttccatttttggaagaaattgcccaggcagcccagacagagacaagaaaacattttggaaacagtgtttatatgttcacaccgatttatattgcaaactattgtgaaaactattgtatttattgtggatttaactgtcacaataagatcaaccgtgcgcaattgaatgcagaagagattgagaaagaaatggcagcaatcgcagagacaggattacaggaaatcctgatcctgacaggggaaagccgcaacaaatctacagtagagtatattggagaggcatgcaagattgcaagaaagcatttcaaagtgatcggtctggaaatctatccggtcaattcagatgagtatgcgtatctgcatgaatgtggagctgactatgtgacagtattccaggaaacatataattcagataagtacgagacacttcatctggcaggacataaaagaatcttcccataccgtgtcaatgcacaggagagagcagtgaaaggtggtatgcgaggagtcggattcggtgcgcttttaggactggatgattttagaaaagatgcttttgcaacaggatatcacgcatatctgttacagagaaaatatccacatgcagaaatcgcattttcctgcccaagacttcgcccaatcatcaataatgacagaatcaatccgatggatgttcatgagccacagcttctgcaggttgtctgtgcatatcgtttgtttatgccatttgcaagcattacagtttcaacaagagagtgtgcacgtgtcagagataatcttgtaaatatcgcagcaactaagatttcagcaggggtaagtacaggaattggaagccatgtggatgatatcgaggataagggcgatgaccagtttgagatttcagatgaacgttcggtagatgaggtttatgatgcattattgaaaaataatctccagccggttatgagtgattatatttatgtgtaagatgaaatgcgatttatcggagatggatttgaaaattatagctgtcagtaatagaaaactgtgcgaaagaccatttttggagcagattgaacgggtttgtcagatgaaaccgcaggcaattattttgcgtgaaaaagatctgtcagaagaggaatatcggattctgtcagaagaagttctgtttgtttgcaagaagtatgagattccgtgtattttacataagttctggaaaacagcattggaattggaatgtacatctgtacatctgccattgccggaattaaggaaacttccggaaggtgtgaaagaaaaatttcaaagaatcggtacttccgttcattcagtggaagatgcaaaggaagcagaaagacttggtgtgtcttacatgacagcaggacatatttatgttacagattgcaagaaaggcctggcaccgagagggcttggattcttaaaagatgtctgcagtactgtgaatgttccggtatatgcgattggtggaatcaagtttgatgaaaaacagtgggaagaattgaaacaaaatggtgcttccggaggatgcattatgtccggaatgatggaactataaaccatgagatatcatgaaatagaattaatgaagcaatacaaattaacttgacctgaaccgggctttacatagtataataaatgcacttgattacgaggatttatgaaattgtaattaggtgcattttttgcatgaaaagaattacgattgatagaaaaaatcagaacagcaacaagacaggaggaaaaagatgcaggatgaattacataataaattagcacatttaaaagagtacataaaagaactggacagtgttgcgattgcattttccagtggagttgattctacatttttattaaaggtggcacatgagatattgggagataatgtgatggcgatcacagtacaatccggttcctttccaaagagagaactaaatgaggcaattgcattttgcaaaaaagaagatatccgtcataaggtctgtcaggtggatgaaatgaagattgaaggattttctcagaacccaccgaacagatgttatttatgcaagcatgcactgtttgaaaagattggagcaattgcagagaaaaatgaaattgcttatgttgcagaaggttctaatatggatgatcttggcgactacagaccggggcttcaggctgtggcggaattaggagtaaaaagtccactgcgcgaagcaggacttacaaaagcggagattcgtgaattgtcaaaagagatgggactttcaacctgggaaaagccatcttttgcctgtctggcttcaagatttgtatacggagaaacaatcagcaaagagaagttgatcatggtggaaaacgcagaacagttattgcttgaacatggcttccggcaatttcgtgtccgtatgcatggaaggatggcgaggatcgaagtactgccggaagagtttttgaagttgcttcaggaagaagtccgtgaggatattgtaaaacaatttaagcagttcggattcacttatgttacaatggatctaacagggtacagaatgggaagtatgaatgaaaccctggataagaagaattagaatgaggcgaaaaagatggaacaaaaggaaatgatagatcttttaagacaggtagcatccggaacaatggatgtagaacaggcagctttgaagttaaaagaagagccttttgaagatcttggttttgccaagattgaccatcacagagccatgcgccagggtgtggcagaagtgatttatggagaaggaaagacaccggaacagattttccggattgcagaagcaatgaaggaaaagggacagaaagcagtcctgatcacaagaatgaataaggagtcagcgatttacgtgggagaacacctggaacttcaatatgacgaagtcagccggattgggtttataggagaagctccaataaaggatggagacgggaaaatagttgtggcaacaggcgggacaagcgatatccctgttgcagaagaggctgcaagaacagcagagactcttggaaatgaagtaatccgtttatatgatgtaggcgtcgcaggagtacatcgtctgcttggacatctcgacgaattaatggaagctcgtgtcattattgctgtagctggaatggaaggagcactcgccagtgtgattggaggactggtggattgcccggtgatcgcagttccgacaagtgttggatatggagcatctttcggtggcgtatcagcgcttctttctatgttgaattcttgtgcaagcggagtgagtgttgtaaatatcgataatggatttggcgcaggatttcttgcaagccggatcaatcacatagagaggagaacgaaagaatgaggacattatatttagactgtgggatgggagcagcaggggatatgctgacggcttcattattgcagttgttttcagaacctgtaaaacaggtgaaaaagttgaatgatctgaaaatcccgggggtaaaatatcagttggtggcgtgtacaagaggcggaatcagaggatatcaggtccgcgtgtttgtgaaaggacaggaagaagagaatcctcatatgcagacagaagagcagatcggacataaatcagaagaaccagagaagcatacacaagaacacggacatcattcaatgtctcagatcgttcgtctgatcaatcggttagaaattgaagatcaggtaaaacaggacgcagttgcagtctataaattgattgcaaaggcggaaggaaaggcgcatggtcagcgcatggatgaaatccatttccatgaggttgggacgatggatgcagtggctgatgttgtggctgtctgctatttgctgaatgaacttcaggtggatcagattcttgcatcaccggttcgtgtcggatatggtcatgtgaaatgtgcacatggaatccttccggtgccggcaccggcaacagcgtatctgatgaaagaaattccaatgtatgcaggagacctggagggagaattctgtacaccgacaggagccgcacttctgaagcattttgttaaaaagtatgaacagatgccggttctgcagatggaagaaatcggttatggctttggaaaaagagagtatgaaagactgaactgtgtgcgtgcgattcttggagaaacgcaagacaaggtagaagaagaaattttggaactgtgctgtaatttggatgatatgacttcggaggaaatcgggtatgcgacagagcttctgatcaaagaaggcgcattggatgtttacacatcctccattcagatgaagaaaaaccggccggggattctgcttacatgtatgtgcagggcagagcagaaagagtattttctacagctgatattcaaacacacttcaacacttggtgtcagagagtatttttgtagaagatatggacttaagcgaaaaatagacgaagtgcagacagaatatggaaccgttcatgtgaagagagcatccggatatggagtggtgaaagaaaaactcgagtatgatgatgtttcccaaattgcagaagaacatagctggtctgtagcagaggcaagaaataggatctatggaaaattataattttaatatacaggaagaattgaaaaagcttccgggaaggccgggagtctatctgatgcatgatgagacggatcagattatctatgtcggaaaagcaatcagcctgaaaaaccgtgtgcggcagtattttcaaagcagcaggaataaaggggttaagatcgaacagatggtaacacatatccgccgctttgaatatattgtgacagattcggaactggaggcgcttgttctggaatgtaatctgatcaaggaacatcggcccaaatataatacgatgcttatggatgacaaggcctatccattcatcaaggtgacaacaggagaggaataccctcgtattatgctggcacgtcagatgaaaaaagataaggcacgttatttcggtccttatacaagctcacaggcggtgcgtgacacaattgatctgatccataagctgtatcatataagaagctgtaatcgttcacttccaaaagacattggaaaagagcgtccgtgtctgaattatcatatcaagcagtgtgaggcaccgtgccagggatacatttcccaggaagaataccggaaatccattgatgaggtgatccgttttctaaatggaaattttgatatgattttaaaagatctggaagataagatgatggccgcttcggaggcactggaatttgagaaagcaatcgaatatagagagttattaaatagtgtaaaaaaggtggctcagaaacagaagattacagattccagtggggaagacagagatgtcatggcagttgcatgccaggacgaggatgcagttgtacaggtcttttttatccgtggcggaagattgatcggaagagaccatttttatctgagaatcagcgaagaggataaaaaatctgaaattctgaacagttttatcaaacagtattatgcaggaaccccttttcttccaggtgagctgatgctgccggaagaaatcgaagagcaggaacttcttgaatcctggctgagcgcgaagaaggggcagaaagtaacgatccgtgtgccgaagaaaggtacaaaagaaaagctggtagaactggcggaagagaatgcgaggatggttctgtctaaagataaagagcggctaaagagggaagaaggacgtacgattggtgcagtgaaggagatagcatctttactggggctggaaaagatcgtccgtatggaagcatatgatatttctaatacaaatggtttcgaatcggtaggctctatggttgtctatgagaaaggaaaaccaaagcggaatgattacaggaagttcaaaatcaagagcgtgaaaggaccagatgattatgcgagcatgcgagaagttcttacgcgtcgttttacacatggattaaaagaacgtgaggagaatgcggaagctgggaaatttacaacatttccggatttaattctgatggatggaggccgtggacaggtaaatattgcattgcaggtgcttgatgagttgaagctgaatattccggtctgtggtatggtgaaagatgacaatcatagaacaagaggattatattataataatgtggaaatcccgattgaccgcaattcagaagcatttaaactgatcacaagaattcaggatgaagcccatcggtttgcaatcgagttccacaggcagctgcgtggcaaagggcaggtacattctgttttggatgatattgaaggaatcggtccggccagaagaaaggcattgatgcggcattatctgagcctggatgcaatccggagcgcaacagtagaagaactggcgcagcttccgtcaatgaatgagaaggcagcagaatcggtttatcaattctttcatgattaagggttttatcgaaaagaaaatcatgatatacttatgtacaggcgatgggacatgtagggaaatgttggatttatgcgagcagtaaatatcatatatctcttgagcttatcaaggcagcatgtctgaaacgaaaagagatacaggaaaaggagattacaagatgagtggtgtgaaattaaccgatatcgttgaaaagatgaatctgaaaaatctcactccggaagtagatatcacagaacgtgaagttcttgttccggatgtgaacagaccggcacttcagctggcaggatttttcgatcattttgatctgaatcgtgtacagattatagggaatgtagagtgtgcctatctggagactttggaagaagagaaaagagttgagatttatcagaaacttctggaacataaagtaccatgtattattttcagcaatgaacttcagccggatgaaagcttcattgagattgctcagaaaaatgatattccggtattcggtacatgtaagaagacatcctcctttatgggagaactgatccgttggctgaatgtaaaacttgctccgtgcatttccattcatggagtgcttgttgacgtatatggtgtcggagttctgatcatgggagaaagtggaatcggtaagagcgaagcagctcttgaattgatcaagcgtggacatcgtcttgtgacggatgatgtggttgagatccgcaaagtcagtgacgatacactggttggttctgcaccggatatcacaagacattttatcgagctgcgtggtatcggaatcgtggatgtaaagtctatgttcggtgtacagagcgtaagagaaacacagaatatcgatctggtcattactctggaagactggagcagagagaaagaatacgacagacttggtctggaggaggaatatacagaattccttggaaaccgagttgtctgccataatattccgatccgtccgggacgtaatctggcgatcatcgtagaatctgctgcagttaaccacagacagaagcagatgggatacaacgctgcacaggaattgtacaaacgtgtgcaggagaatctggcaaagagaagaaaataaaacaaaagagaaacagaggatgcggtacaaatgttacagagtaccgcattcttatgtgaaatataaaaagaaacggagatagatttatgaaatattgttttggtgttgatatcgggggaacaacggttaaacttggtctgttcagtgaggcaggtgctattgtagagaaatgggagatcgtgacaagaactgagaatgaaggtgcggcgattcttccggatgttgcagaagcaatcaatggtaagttagagcagcacggcattgagaaagaacaggttcttggaatcggtgtcggtgtgccggctcctgttactgtagatggaattgtcaacggttctgcgaatcttggctggaaatataagaatgcaaagaaagagctggaagaactgacaggattgacagcagagtttggaaatgatgcgaatgtcgcagcacttggcgagatgtggaaaggcggcggtgttggttaccgcaatatgatcatggtcacacttggaacaggtgttggaggtggcattatcatcaatggaaagatcctgacgggagagaacggagcaggtggagagattggtcatatgtgtgtgaatctggaagagacagatacttgcggatgtggcggacacggatgtctggagcagtatgcatcagcaacaggtatctctcgtcttgcaagaaagaagatggagcatgagacacgtgcaacaatcctgacaaaagaagatctttctgcaaaagctgttttcgatgcagtcaaagaaggagacgaagttgcgattgaagttgcgacagagatgggaaattacttaggacatgcaatggcagatatggcagcagtactggatccggctgtatttgtaattggtggcggagtgtccaaagcaggagaagttctgctttcatttatcgaaaaaccatttatggaaaaagcgttctttgcaaataagaatgtgaagttcaagcttgctactcttggaaatgatgcaggaatctgcggagcagctaagctggtacttgaggattgataaaagtataacaagtgcagaataaatagtagaaagaaaaaagaggagatttttacagatgttggatatctgtgaaaacccctctttttttggaaaatctattatgcaagcacttttttgaaactaactttaaagtatatggtttctgcaatcgctgtgagtccccaggagaagatgtacagcagatacagagatggaattgtatggaagtaagcaaataccgtatagatccatataatacgaaatacacaggatcccatgattacaataaatgtaggagcaatgctcttgccgattcctctggaagatgcaatcgcacagtccataaaggcgctgaatgcataggagaatcccataatcctaattctatgcataccagctgcgataacggctggttctgtggcaaacagagacaagaatgggcgcccaaagaagaagagtgctcctccgagaagcaggcctgcactgaaagaataagtaagtgttacgagatagcattttttcattctttctttattcccggctccccagttctggctcatgaaactggaacaggccacatagaaggcaaacataacattgtaaatcagattgtctgcattcgcagctgcagcatttccggaaaccatgatcgcatcaaaggagttgactccggattgaacaaaaaggtttgcaatcgcgaaaatcgcattctgaagaccggatggaacaccgagataaagaactccttttccataaatgttatgataacgcagattgcgcagacaaactttacattcatcatcgcgtcgcatcagatggatcaggatcaatcctcctgaaacgtactgtgcgattgcactggcagtagcaactccgacagcagccatatggaatacgataacaaagatcagattcaataggacattaagtattccggcaaatgcaaggtaatacatcggacgctttgtatccccacgggcgcttaagacaccgttgccgaaattgtaaactgccgtggcaggcatgccaagtgcaaaaactttcatgtagagaacagcctgatcgagcagttcgggctttgtattcatcatggaaagcattggtcctgcaaaaagcagacagatcagacagacaaaaatacctgccgctgcacagataatgagtgcagagtgaatggtttcttttgtagctttcttatcaccggcaccgagtttattggcaacctggacgttgacaccacttccgagcccgatcagaagtcccgtgaacagtgtgacaagtgtagttgtcgagccgacagaaccaagtgctttgtaatctgcaaaatgtccgacaacagcgacatcacttaagttgaacatcacttccaaaatctgggaaaacataagaggaacactgaagaaaaacatgtttttccaaagagatccctgagtcatttcaattgttcgatttcgtcttttcgctatttcattactcattccctaatacccctttactagataaaataatgaaagaaaacagataaaatcataaaaaaaacatcacttccaaaagaaagcaatgaaaaataacgtattgtattgtgcattaataaaccttttggatgccccaaacacccgtagctgttgttactgttcacacgggagtgaacagtaactatctgttttctggttaaaatccgatgattcttatatacagtgtagcatgaaaagtgcggggaaacaacaggaaaaacaataattttttttcaatgattcttttattttttcagatgaatttaagccttgaaaataaatttttacgacaaaaagattaaaataaatcaagaaaaagattaaaatagactcttgatttctgatttcagaggactataatgtcagagtaaacaaaatacagttcaccaaaattcgttgatgagaacaaaaccgtatccgtcattattttcagagagtctgtggctggtgtgaacagacaataaccgggtaaggatatcctctctaagaagcgggctgaaagcagatgaacatgttgcaagtaaacctcgccgggatccaccgttatatggatagcatatgttggtatgtgaagtgtcgcagaattaatttttgcggaattagggtggtaacgcggattatattcgtcccttttcagattgagttctggaaagggacttttttctttgaatatatctcaagaagaatacaaattttaggtgaacaagaatcctaaggaggtattgtaatgaaagcattacaaaaagtcagcaaatttttatcagattatacttcagtggttgttattgccattgcagtagtgacattctttgtcccgacaatgatgggatgggttaacaacgctttgtttgtcgatccggtatccaataaatttacctgtcagtctattattatcggagtgatcatgtttagtatgggtctgacattaacaacagaggattttaagattctggcgcagagaccgtttgacatctgcatcggagctatcgcccagtatctgattatgccattccttgcatttgcactgacaaaggcattgaatcttccggatggaatcgctttgggactgattcttgtcggatgttgtcctggtggtgtgtcatccaatattatgtcttatctgtgtggaggagacgtagcattttccgtaggaatgacaacagtttcaacactgctctcaccagttatgacaccacttatggtttcactgctggcaagtggtacacatatttcaatcaaaggattacctatgtttgtatccattattgaaacagttatcttcccggtagcagtaggattcttacttaactatctgttaggaaaaaataaaacattcaaagaacttcagaaaattatgcctggtattgcagtacttggacttgcatgcgttgtcggcggtgtagtatcttcacagggaagcaaattctttgagtccggtgttgtaatcttcgtagcagtatttcttcataatggacttggatatctgcttggatacggagctggtaaactcacaggaatgaatacagcgaagaagagaacaatctcgatcgaggtaggtatgcagaatgcaggacttgcaacaaaccttgcaacaacaacagcacagtttgcatccacaccggagtcagcaatcatctgtgcagtatcttgtacatggcattctatttcaggaacactccttgcaggaatgtttgcatattatgataaattcaaagaggacagagaatccaagagtgtgaatacaaaagaagaagcagtatgatgtgttcgaggattgcgggaattgcatagcaatggagcaatccggttacatcagtgagtggcaaaatttacttttgacactcatatcaccgtataagaaggataattgatttagaggatggtttgacacaacgaacaagaaacgttcgaatgtgagaaaccatccttttttctgtgttgcatggtgaggaaaatcattttataataaataaggcaagggattctatctgaacataagaaagtaatcagagttcgaaataaaagagaaatacaagaggggaaatgtaaatggaagaaaaagaaaatacagaaaatgcggagatgggaaaacgaaaacattctcatgatacaaaaatagtaataaagtattattatgaaaggatccgacagaacacgagaaattttctgaaatggatggggctttctgttttgacaggtctggttgtaggcggtgcgagtgcagtatttgcaggatgtatcaaggcagcaacggaatacagggatacacataattggatttttatgcttttgccggttgcaggagttctgattgtatttatgtatgagaagataggaaggcaggacggaggaacgaatcaggtacttgctacaattaaatcaaaggatgatgttccgtttctgtcagcaccattgatttttgtgtcaacattattgacgcatcttaccggtggctcggcaggaagagaaggtgcgtcgatacagtttggtggaagtattggaaattggcttggaaaactggctcatttagatgaatttgatcaccatgtgatgatcatgtgcggaatgagtgcagcgtttgcagccgtgtttggaacaccgatggcagcagcagtttttgcaatggaagttgtgagcgtgggggtaatgtattacgcagcacttcttccgtgtgtgattgcagctatcattgcagcagagtttgcaacaggaatggggattgatccggagacatttccggtacattctatcccgggacttactgtggagtcaggacttaagatggcactgatcgcagtggggtgtgggattttaagtattctattctgtatcttgctaaaaacagtagggcagttgtatgcaaagtatctgaaaaatccgtatattagaattgttgttgcagcaggagtgatcattctgctcacaatatgtctgaatacaaaagattatatgggagcaggtagtggattgatcgcaagagctattgaaaagggtgaagcaagaccacttgattttttatggaaaatgttacttacagcacttacgatgcgggcaggatatcgtggtggtgagattgtaccggcattcagtataggtgcaacatttggatgtgttgccggtggaatacttggattttcaccggaattagcagcggcagccagcatggttgcacttttctgcggagtgacgaactgtccgattacggcaatgctgatttcattcgaactgtttggattttcaggagcagcatattatctgatcgcgatatcaatcagctatgcggtttccggatattatagtttatataaagatcagacgattgtatattctaaatataaagcaagatatattaaccgtaaaacaagatagcagaatattgtatcagagagatacggacaggatgacaagagcaatcagttatataagtatgcgaaaaggagaggcgttttgtatagcctctcctttttaggtgtaccttgcggcgcatcatttacttattgagtggtacttccactttcagtgtcgctaccagtagtgctgccggaagtatcagtatcacctgtagttgttccggttgttccaccagagtctccgccggcagcgggttcggttgttgttccaccagaggaagaatccggtgatgatgttgctccagaagaatcggtacctgtagcaggtgtggtttcatcagaactctcggtgtcatctttctcatagtattctgatggcgcaaaatagtgaccactacagctcttagtcggaacattgtcttttgaaaaatactctgtaatggcaggacaactgcttgtggcaaggagtcctgttttagtacaaaccgtcttttcttcgacagaggatggaatttcaaagtccttgtactcaaggccttttgtatcctggatacgttccatgatatttctccaaagtttctgatgccagttctggcttaatcgatccattgtcttatgctcatcatatccaccccatacagacgctgtataataaggcgtaaatgctgaaatccacaagtcgcggctttcctggctggtacctgttttagcggcaacaggcatgttgctcagtcttgcagaaccaccggttccaccggcaccgttgacaacgtcttccattgcacttgtcagaagataagcagtggagtcttttaagacttcatgtgtctcaggggttgtgttatcgagaagaacatttccttcatgatccagaacctgtgtgtaaagaatcggtttcatgtaagttccaccattggcaattgctgcataggcagctgtcatctcgatattatatacaccgtttgtgataccaccaagagctttcgcctgtgaatatttatcatcttcagtcagtgttgtaaatccaaaatcaagaagataatcataactttccgtttcaccaacatagtcagttaatgtcttaacggcaaggacgttcatagaatgttcgattccataacggacacgtgtcggaccgatatattttttatcccagttgtttacggactgtccgtttttatattcatattcttcatcatcaattgttgttgcaagagtgatctttccttcgttaagtgccggtgcataagcagcaagaatcttgaaacaggatccaggctgtcttgcagaatctgtggcacggtttagagaaagactggatttcttttcgccgcgtccaccgacgatggctttcacctgtccggtatactgatccatcacaacaacagaagcctgcggctgaggtgagagctcaattctctcatcaacagtgtctccgtcagcctcattgatattgagcgttgatttaaatgcatcaactgcttcctgtgcagcttcttcagaaccgtagagaagaggagtgtcatatccccatgcagtctgaatataagaagcaagttgttctttgctgtagttctcagaagaaccatctgccctgtggatagtaagtgcgtaatcaagcccatattctgtatcaccattgagataatcccctacattagcaacttcgtcatcacagatggcctgaatatcagcatcctgtgtaacgttgatcgtaaggccgccgctatagagcagattatatgcctgtgtttctgtataactcttctcagttacaagatcatctacaacctgatttatgacagcatcgatgaaataagtgtaaggtttggatgcagttgtatttgacgctgtttcggaaatgcggtcatatacattatcagccatagcctcatcgtattcatcctttgtgatagagccttgttccttcatgtttttcagtactttttcccgtctttttgcattattctccgggttgctaacaggattcagattcgacggactctgagtgatcgctgcgataactgcacattcagaaagagtcaggtcttttgcatctttattaaagtaacgctgtgcggctgtctgaactccgaggcatccctgacctaaattgattgtgttcatgtatgcttcaagaatctcttccttactcatctctttttcaatctttagtgcaaggtactgttcctggattttacgttcaattcgctgatacttactctcattgatgaaattagggaatacattatttttgatcagctgctgggttaatgtgctggctccttctgtgaaatggaagccatgtgcaacaccattgacaccggcacggataattccctggatatcaataccattatgcttgaagaaacgttcgtcctcgatcgcaacaaaagcttttcccatgtatggtgaaatctcgtcatatttcttgtaaacacggttagaatcagagtctttgagttgctcaagcaaagttccattggaatcgacaatattcgttgtatagccctgtggcataatgtcctttgctgtgacttccggtgtattgtcaatcactttttttacatatatgccaactccggctgccccaatgacgatcaaaagcagaaaacaaataatgagggctttgaaaaaacgtacgccgactcgcttctttttccttttctttttagaagaaattcgcttttttcttctagaaagattcgattttccgtaattcacgtataatatcctcctttattgacttctatgattatatcaaatttaccgatgtaaataaaggtaaatttgaaaagttcaaattttcctgaaaatcttaagaaaaaatacagttttatatagaaaagcatggtatattagataaagaaatattttcaaatatagcaaaaataaaaaaggaatgggagactgaaaaatggaaatctaccatacaatatataagggcggagacggagaaattgttgaaaagaaatccagatttattgcagaagtgcatccggtcacatcagaagaagaagccatggagattttagagcagacaagaaagcagtactgggatgcgagacatcattgctgggcttacattataggaaggaatccggcggcagaaagaatgagtgatgatggagaaccggcaggaacagcaggaaaaccgattttggaggtgatccgtgggagagaactgacgaatgtacttgtaattgttacaagatattttggaggtacgcttcttggaacaggtggactggtcagggcttatacagcagcaacgatcgaaggattgaagaacagtgagagcattgcaaggattcatggggtgaaactcggaattgagacgaattatacggatttgggaaaaattcaatatctgattgcaaatcgaaatctggatcaattagaacctgtttacacagataaggttgaaatgacagtgtttgttccgacagatgagatgggcagcctgcgggctgaactgatggaagggacaaacggtcaggtggttctggatgaagagacaacctgttggtttgcaaggacagaagatggaattaagatttttgatgaagaataattctcatagaagatgttgttttgtgagatagaaaggaccccctgccggaatatctggcaggggatcctttcctttaagtgtgtgtcatataacattcaataaatctacttatactgaatagatatgttctatgagaattctggttcgatcagaccaaatgaaccatcttttcttttgtatactacattgacttcatcagtttcggcattggagaatacgaagaagttatgtccgagaagttccatctgaacacaggcatcttctggaaacattggtttaataccaaatttctttgtacgaacgatatggacttcatcgtcttctgttgtctcttcttctgaatcaaagaattcttttctgaagctgttacctgatggagcatatgatgtaggatgtccctgattacgagcaaccagtttgttcttatatttgcgaagctggcgttcgatgatctcttctacaagatcaatggaaacatacatatcattgcttgtctgctcagaacggataatatttcccttcactgggattgttacctcaattttctgacgtcctttttctacactgagcgttacattgatttctgtttcaggagtgaagtacctttcaagttttcctaatttctgttcgatagcatcctttaatcccggtgttacctcgatgttttttccgctgataataaatttcatgctgctcaactcctttgttcaaattatacagaagaatgattagattacttctgtatcatggttatattataacatgaaaaagattttctgtatacaataaatcgtcctaaaattatgaaaattttcaaaactttagaacgattttaaaattatcagataattaatgaatactattttgatcggcgagcataagcttcaaacacgaatattatttattgatcgtgctgcgttttctcattctggaatccagaatcttcttacggatacgcaggttttccggtgttacttcaagaagttcatcggtatcaataaagtcaagtgcctgttcgaggctgagaacacgcggaggtgtcagacgaagtgcttcatctgcgctggaagaacgtgtgttagtaagatgttttgtcttacatacgttcagttcgatatcttcagctttaccattctgtccgataaccataccggaatatactttctcaccggctccgatgaagagagtaccacgctcctgggcactgtacagaccataagttacggattcaccagtctcaaatgcgatcagggatccctgcttacgatactggatatctcctttgtatggtgcatatccttcaaagcttgtgttgatgataccatttccttttgtatctgtcatgaactcaccacggtatccaatcagtccacgtgccgggataaggaattcgagacgagtatatccaccgtttgacggagtcatgttgcggagttcaccttttctctgaccgagtttttcaataacaattccagtgaactcatcaggaacatcaatataagcaagttccataggctcaagttttttgccattttcatctgtgtgatacagaacttcagctttacttactgcaaactcgtatccttcacgacgcatgttctcaataagaacagaaaggtgaagctcaccacgaccggatactttgaagctgtctgcattttctgtctcttctactcgaaggctgacatctgtgttcagctcacggaaaagacggtcacgcagatgacgggatgtaacgaatttaccttcctgtcctgcaaacgggctgtcgtttacgataaactgcatagagattgttggctcagaaatcttctggaacggaatggcttccggattctcaggagagcagagagtatctccgatggaaatatctgtgatacctgatactgcaacaatagacccgaaagaagcttcttttacttctacacggttcagtccgtcgaattcatagagtttaccaatttttacacgctgctgtttgtcaggatcatgatggtttacaacaaccatatcctggttcacggaaattgtaccgttttctactttaccaactccgatacgaccaacatattcattgtagtcgatcgtgctgatcagcatctgggtcggagcttccggatcaccttctggagcaggaatgtagtcaaggattgtctcgaacagtggtttcatatcctgtttctcgtcagagagatcaaggacagcaacaccagcttttgcagaagcatatacaaaaggacactcaagctgctcatctgaagcaccgagatcgataaagagttcaagaacctcatcaattacgtcatccggtcttgcttccggacggtcaatcttattgatgcatacgataacaggaagttccagttcaagtgcttttctcagaacgaattttgtctgaggcatagcaccttcaaatgcatcaacaacaagtacaacaccatttaccatcttaagaacacgttctacttctccaccgaagtcagcgtgtccaggtgtgtcaatgatattgatcttaacaccattataatgaacggcagtattcttagaaaggattgtaattccacgttcacgctcaatgtcattagagtccatgacacgttcttctacttcctgattctcacggaatacaccgctctgttttaaaagctcgtcaaccagagttgtcttaccatggtcaacatgggcgataattgcaacatttctcacatcttcacgttttgttttcataatctaaacactcttccttattatacaaaaaatatttatctgtaacataacttcattattttatcacaaaaaataaaatttacaagaaaaagttaaaatctgatgttttatgtatcttttcaaatacaatttaaagtcaacagaagcattttgtgctgaagaagaggggggagattttgaattcgattttaagtacgaaaaaggtcgaatgttttttctgtaaaaaatagttctatttcattacaataagacatacattaggtaatgacttaaaataccagccagaggaagggagaattataaattatgtcagataagattattgaaaacaaccaggtgacagttattggagaggtggtatcagagtttacatacagccatgaggtctttggagaaggtttctatatggtagaacttcttgtaaagcggttaagtaactcttgtgaccggattccggtcatgatatcagaacgtctcattgacgtaacacaggattgccgtggagaatatttaatggtgtctggtcagttcagatcctataatcgtcatgaggagacaaaaaacagactggttctttctgtgtttgcgagagaaatagaatttatcgaagaagaaccggatggagcaagaacaaatcatatacttctcgaaggatatatgtgtaagcgtccggtctacagaaaaacacctcttggaagagaaattgcagatattctgctggcagtgaacagaccgtatggaaaatctgattatattccatgtatctgctgggggagaaatgcaagatatgcttcaaactttgatgtaggggaacatgtcagaatattcggaagaatccaaagcagagagtatgtgaagaaattgtcagagacacaaacagagacaagaattgcatatgaggtctccgtcagtaaactggagtgtgtggaagaattctaagggtggattgtttcattatttaaaactttgtgaaaaggatatcatatattgagataacaactcaaatgtgatattcttttttatatgatatttcggaaaataagagtgcaatgaaagaaaaaacaggtaatgctgatagacagtagttctgaaaaatcatggaatacttgaggtttcatacaggaggaagatacagatggttaagatattaatgcacggatgcaacggaaaaatgggacgcatgatcacagaaattgtgaagaatgaagaagatgcagtgattgcggcaggtgtcgacaagttcacaggaattccaaatgattatccggtatttgaggagatcacacagtgtgatgtggatgtagatgtagtgattgatttttccaatgcgggagcagtggatgaattgttagattactgtgtgaagaagagtcttccggttgttctttgtacaacagggctttcagatgaacagttaaagaaggtagatgagtgttctgagaagattgcagttcttaagtctgcgaatatgtcaatgggaatcaacctgttactgaaacttttgaaagatgctgctaaagtacttgcaccggcaggctatgatattgaacttgttgagaaacaccataatcagaagctggatgcgccaagcggaacggcacttgcattggcagattctattaatgaagcaatgggaaatgaatacgagtatgtgtatgacagaagtcaggtgagaaagaagcgagacgcaaaggaaattggtatttcagcagttcgtgcaggaacaatcgtaggagaacatgaggtgatttttgcaggaacagatgaagtgattgaatttaaacatactgcatattcaagaagcgtatttgccaaaggtgcagttgaggcaggaaagttccttgcgggacagccagctggcatgtatgacatgggggatgtgattcagttttagtactggatgaataatagccggtaaaccggcgggaataagatccggtaaatagatcccggtaaggggaagatttcgggtctggaggagattgtatatggaaaatatggaaaaccgttatttagacaggttgtcggatctttatccgacaattgcagctgcatctacggagattattaatctgcaggcaattttgaaccttccgaaggggacagaacattttctgacggatgtacatggagaagatgaagctttttctcatgttctgaggaatgggtctggtgccgtgagaagcaagattgaagatgtttttggtaatacaatgagtgtaaaggacaaaaaagcactggcaacattgatttactatccgaaagcgaagatggaacaggtgaagcggacggagtcgaatatggatgactggtatcgagtgaatctgtatcgtctgatagaagtaagtaagcgtgcagcaagtaaatatacaagatctaaagtgagaaaatcactgccgaaggatttctcttatgtgatcgaagaattgattaccgagaaagcggaagtcagtgacaaagagtcctattataatgaaattatttctacaatcatcaggatcggacgggcagaagaatttattgcagcaatttcagaactgatccagcgtctggttgtggatcatctgcatattgtcggtgatatttatgacagaggaccgggaccgcatcttattatggataagctgctgaaatatcattctgttgatattcagtggggaaaccatgatgttgtatggatgggggcagcggccggacagttgggctgcattgcaaatgtgatccgtatctgcgccagatatggaaacctggatattatagaagatggttatggtatcaatttgcttccactggctacatttgctatgaggatgtacaaggatgatccatgtacctgttttaaattgaaaggtactgacagaccggaatctgatgagatgcagatgaatctgagaatacataaagcgatctcaattattcagtttaaagtagaaggccagattatagagaggcagaaaggattccatctggagaatcgtgcgttactgcataagattgattatcagaaaggtacgattaatctggaaggaaaagaatataagctcctggatacaaatttcccgacaatagatccaaagaacccatataaactgacttctgaagaggaagaaattatggatcgtctggtgcatgcttttgtgggatgtgaaaaattgcaggaacatatgcgtttccttcttgcgaaaggtggtttgtataaggtatataacaataatctgttgtatcatggatgtgtaccgttagatgcgaaggggaacctgaaagaagtagaaattttcggaaagaaatatcgtggaaaggccttgtatgatgtgttggaaagttatgtgagaaaaggattttttgcattggatccaaaggagcgggaagatggaaaagatataatgtggtatatctggttacatccggattcaccgttatttggaaagaacaagatggcgacctttgaaagatatttccttgcagagaaggaaacacatacagaaaagaaaaatccatactatgctctgcttgaaaatgagacagttgtggataatatcatgatagaatttggattggatccaaaagaggatacacacattgtaaatggtcatgtgccggttaagagaaaagatggcgagagtccgatcaagtgtaatggtaaagtaatggttattgatgggggattttcaagagcatatcagaaagaaaccggaattgcaggatacacgctggtttataattcgtatggattacttttggtagcacatgaaccatttgagtctacagaagcagcaattaagaaagaaaatgacattcattcagagacagtagtagtgaccagagtgaacgagagacgtcttgttggtgacaccgacgctggaaggaaattaaaagaacagattaaagatcttgaatggctgctggcgtcgtacagaaatggtcagattatagaaaaactgtaaataattgtttatgctgattatagagacgtagaaaaatatatcagctgggagatgactcccacctctataggtggtgagaaacaagctagtatcagtggtgggagtcaatcccccagctgatatagcctccggcaggattgcagaggtgcgcagtagaagtatgtcatgcaattgcatgacgcgcacctcgcagcaagaatgccgaggcattcttgaattaggactgaagatagaaaggattactagaatggaaaaagacttaaatcttccggaaggaacagaagtaacagaaccgctgaaaatctatctgaatgagattggacagatccctttgctgtcagaagaagaggaaagggatcttgggtgtaaaagtgcttcaggagatgaggatgcaaggagaaagctggaagaggggaatctacgcctggtggtatctctcgcaaaacattatactggcagagggattacactcatggatctgatccaggaggggaatattggtctcatgcatgcagcagagaaatatgattatacaaaggaaaatcgattttccacatatgcatcatggtggatcaaagaagcaatgcagcgggcaatcgatcagcagtcacgagaaatccgtgtgccggttcatgttgcagagaatatgaagaaagtacagaaaattgcaaaagatcttcagcagaaatttggaagagaggctacaccggaagagatagcagcagagatgaaggataaatcaccggaatttgtaaaagagattttgtcatatcttcagaatccggtttcactggaaactccggtaggagaagatggggagaataatcttggtgatatggttgaagataaggatgcaacgacgccggaagatgctatgaatcagcttgtgcaaaaagaagaagtacaggaattgttagagtctcttaatgacagagaacgtcaggtgatccgcttgagatttggtctggaagatggaaaaacacatacgttggaagaaatcggtgatgaactgaatgtgacaagagaacgcgtacgtcagattgaggccagagcgatggagaaacttcgcagcaaagcgacaaaactgtaaaaaatttcttttgaataaatattgaaaaattgcagatagtaaagacacaatatttatttgaaaggaagacgaaaaatgaggagaataagaaaattgcttgtctgtgtgatgtgcgtactgatgctttgcagtttcgctggttgtggaaacaacacaggaacagcgaatgacaatctcaatgatgcgacatccggtgaaaactatgatggaagtggagaaaatggtaataataccggaaataatgcgggagaccagaatggagatagtatcctagatgacgcggttgacgatgtaacggatggcgtggatgatgttacagacgatatcacaaatggtgtcgatgatgcagccgatgatctgacgcaggagaatggcgtgcagaacaagatgcagaataacgagtgatcaatatgccgtaggccggaaacggaactgcggcatttttctaaaagaaggagagacaggatgagattcagaccatgtattgatatacataatggaaaagtgaaacagattgtgggcggaagcctgaaagatgaaggaaatcaggtcagcacaaactttacgtcagaactggatgcagcatggtatgcaagacagtatcagaaagatcacctgaaaggcggccatataattcttttaaatccagttggatcagaatactacgaggcgacgaaaaagcaggcgatgggagctctggcggcatacccgggtggaatgcagatcggtggtggaattacagcagataatgcacaggaatatctagattcaggagcaagccatgtgatcgtgacttcttatgtgtttaaagacggaatctttcatgaagagaggcttcagaaactggtggctgcagttgggaaagaacatgtggttttagatcttagctgcagaagaaaagatggtaaattttacgtggttactgaccgctggcagaagttcacagaacttgcattattacacaaggtgttaaatgagctttcaaaatattgtgatgaattcctgatccatggtgtagatgtggaggggaaaggtgccggaatggaaacagaattagtaaggatgcttgggagctgggacggaatcccaatcacttatgccggtggaatcggatcaatggaagatctggagagatttcgaaaagagagcggcggaaaagtagactttacaatcggaagcgctcttgatctgtttggcgggaaaattccatatgcagaagtttgtagttactgttcactcccgtgttaatcactccgcttgtaaatccgcagaatgttaacactctatgaagttgttgaattcaagagcggatagtgatagaatgtagaacagagtggaatttcagaccaaaatcaaaattcaaagaaggagtaattgcggaaatatgaatattatagaaaagattttcggaactcacagtgagaacgagctaaaacgaatttatccgatcgtagaccgcatcgaggcactggggccggagatggaggcgctttcagacgaagaacttcgaggaaagacaaaagaatttaaagaacgactgaaagagggagagactctggatgatatccttccggaagcatatgctgtagtaagagaaggtgcttacagaagtcttggaatgcgtcattatagagtacagttgattggtggtattatcttgcatcagggacgtatcgcagagatgagaactggtgaaggtaagacacttgtgtccacacttccggcatatttgaatgccttggacggaaaaggtgttcacatcgtcacagttaatgattatctggcaaagcgtgatgctgagtggatgggaaaagtacatgagtttttaggactcaaagtcggtgttgttctcaatgagatgaacaatgacgagagacgagaggcttataattgcgatattacttatgtaacgaataatgaacttggatttgattatctgagagataacatggttatctataaagaacagctggttcagagaggattgcattatgcagttatcgatgaggtcgattccgttttgatcgatgaggccagaacacctttgatcatttccggacagagtggaaagtctacagctctgtatgaagcctgtgatgttcttgcaaaacagctggaacgcggtgaggcaagcggtgagttttccaagatgaatgccatcatgggagaagaaattgaagagacaggtgatttcatcgttgatgagaaagagaagacagttaacctgacagaagatggtgtgaagaaagtagagaaattcttccacatcgaaaaccttgctgatccggagaacctggaaatccagcataatattatccttgcactcagagcacacaatctgatgttccgtgatcaggattatgttgtaactccggatggtgaagttatgatcgtcgatgagtttacaggacgtatcatgccgggacgtcgttactctgatggtctgcatcaggcaatcgaggcgaaggaacatgtgaaggtaagaagagagagtaagactctggcaacaatcacattccagaacctgtttaataagtatgacaagaagagtggtatgacaggtactgcgatcacagaggagaaagagttccgtgatatttatggaatggacgttgttgaaattccgacaaacaggccggtacagagagtggatcttgaggatgctgtttataagacaaagaaagaaaaatacgaagcagttgtagaagctgttaaagaagcgcatgcaacaggacagccggtgctggtaggtacaattacaattgaagtatccgaacttctcagcaagatgctgaagaaagagggaatcaagcataatgtactgaatgcaaagtatcatgagcaggaggctgcaatcgtagccgatgccggacttcatggagcggtaacgatcgcaaccaatatggctggccgtggtactgatatcaagctggatgatgatgcgcgtgcggcaggtggactgaaaattatcggtacagagagacatgaatcccgtcgtattgacaatcagctgcgtggacgttccggacgtcagggagatccaggagagtccagattctacatttctctggaagatgatctgatgcgactgttcggttcagaaagactgatgggaattttcaatacacttggtgtagaagatggtgagcagattgaacataagatgctttcaagtgcaattgagaaagcacagaagaagattgagagcaataactttggtattcgtaagaatctgttggagtacgatcaggtaatgaacgagcagagagagattatttacgaagagagacgccgtgttcttgatggagaaagcatgcgtgatacaatctacagcatgattacagaatatgtggaaaatatgacagatcgtttcgcttctacagaggcagatccggaagagtgggatatcaaaggattggatgtgaatcttcacaatgtgattccacagcttcagctcccatctgagaaggaatgccagagtatgagtcagaaggagttaaagcatcttctgaaagaacgtggagtgaaggcttatgagaacaaagaagcagagttcccggaggcagagcagcttcgcgaagttgagcgtgttgtacttctgaaagtgattgatgcaagatggatggatcatatcgatgatatggatcagctgcgtcagggaatcggtcttcaggcttatgggcagagagatccactggtagagtacaagatgacaggatatgagatgttcggtgaaatgacaaatgcaatcgctgaaaacacgatccgtacattattccacattaaggttgagcagaaagtggagagagaagaggttgcaaaagtaaccggaacaaacaaagataacagcgcagtccgtgcaccgaaaaagcgcgaggagaagaagatttatccaaacgatccatgcccatgcggaagtggaaagaagtacaaacaatgctgtggaagaaagattaaataatctgtaactgttcagagccaagcaaaatttcaaaaaaagatgtaaaatgcgtagcattttggaggttggctctgaacagttacaataatttaaagttatatatatgaaagaggtgattaaggtggttttactggatgaactgaagtcaagactgactgcatatgaagaaccgctgaaagatttgagggattcactttgacctcgcttcaaagaagcttaggatcgaagaattagaaaagagactggaggaaccaggattctgggatgacccggaggtttcccagcatgtaatgaaagaattgaaaggtcttcaggattctgtaaaagagattgaaaaattatttacagattatgaagacatgcttcttctgattgaaatgagtgcaggagaagacgaggagcaggaagccgcagaagagattgaagaggaacttggaacatttgaggaagtctttgagaaactgcgaatcagcacacttctgatcggaccgtatgatgcagataatgcaatcgtgacacttcacgcaggtgcgggcggtacagaggcaatggactggacaagtatgctctatcgtatgtacagccgctgggctgaaaagagaggatatgaagtcgaggtgctggactatctggaaggagatgtagcaggtatcaagggagttacttttgaggttaagggagaaaatgcttatggctatctccgttccgagaaaggtgtacatcgtctggtacgtatttctccatttaatgcaaatggaaaacgacagacatcatttgcatcctgtgatgtaattccggatattgaagaagatatcgatatcgagatcaacgacgatgatatccgtgtcgatacttatcgttccagtggtgccggcggacagcatatcaataagacgtcatctgcaatccgaatcacacatcttccgacaggaattgtggttcagtgtcagaatgaacgttcccagcacatgaataaagataaggcgatgcagatgttgaaatccaaactgtatgtactcaaacagcaggaacaggcagagaagatgtcagacatccgcggagaggttagagatattaatttcggaaatcagatccgttcttatgtcatgcagccatatacacttgtcaaggatcacagaacaaacgcagaaatcagcaatgtaggtgcagtaatggatggaaatattgatccttttattaacgcatatttgagcatggatgcagaagcacagaaaggaaagaaagcagaatgataaatgtagcagtaatgggatacggtacagtaggatcaggagttgtagaggtcctcagaaccaatggtgaactcatcaatgaaagagctcaggatgtgataaatgtaaaatacgttctggatctcagagatttcccgggagatccggtagaagagattctgatacatgatttcgagacaatcgtaaatgatgcagaagtagacattgttgttgagacaatgggaggtgtagagcctgcttatacatttgtaaaacgttgtctggaagcaggtaagaacgttgcgacatccaacaaagctctggtagcaaaacatggagcagaacttcttgcgattgctcgtgacagaagtatcaattttatgtttgaagcaagtgttggtgggggtatcccgatcattcgtgcactgaattcctctctgacagcagacagaattgatgaagtgacaggaattctgaatggaacaacaaactatatgctgacaaagatgttctttgagagtgctgattatgatgaggtgctcaaagaggcgcaggagaaaggatacgcggagcgtaatccggaagcagatgtcgagggacatgatgcgtgtaggaagattgcgattctgacatctctgatcgcaggacaacatgtggattttgagacaatccatacagaaggaatcacaaagatcacaacagaagatatgaagtatgccaagacgatggatatggcaatcaagctgcttgcatccagtaaaagagaaggggaatctttctctgcaatcgttgcaccgatgcttctttccaagaatcatccgctgtgtaatgtgaatgatgtatttaatgcaatttttgttcgtggaaatatgcttggtgatgcaatgttctacggaagtggagcgggtaagcttccgacagcaagtgctgtagttgcagatgttgtagatgctgcaaagcaccttcacagaactgttgtaacaagatgggagagtaacacactcgaacttgttccgaatgcggatgcgaagagaagattcttcgtcagaattcatggagaagaatctgtactcaaatcccgtgtggacgaagtgttcggacaagttaaatttgtcaaagcagatgatgtcgagggagaattcgctgttatcacaggcgagatgaccgaggcggagtatgcacagaaggcagaagagatgccggaagttgtgaagatgatccgtatggcagattaatttgtatttgcttcattggattctgaaagtatagtagaaagagccagagcaggtaccatatatggtaactgtcctggctcttgtgttacatacggctcagtgtactgttatggtacgcagaactaaaggtaacgtcctctcccagccattgaggtgcgggataggtgttagctgtttcttcgtccgggaattcaatttcggcgagaatcagtggagcaaggtcatcatggaagatatctaattcaagaaaaagcggagtggaacagaagtctgcgttttccgggcagacacaactcataggaatgacatagcgtgttttatgaatgatgcgtccgtcgactttttcttttagatgctcataactttctttggtaagaggaaggttatattcttcacgggtcataagccctttggatttgtaggtgagaacataatcgtcatcctctctgcgtatccttacgacaggagcagtgcataagtagccttgttccagctctttgtgtggataatcgaaaggagaaaatggtagtttttcaaacttttgtattaaaaatttgcgttctatttccatagttaaagaatcctcctgatgttgattagttatactataatacgtgaaatgcaaaaaggcaacggtgagatgaggaggcaggcaatttattgactaaaaatagaaattttaaagtagagtcaatactttagaataacgagatatgtatcatcttgacgaataacttatcctggcgttaaaataaaatcattgttgagatatcatcggaaagcgaggaagtattggatgaagaaagtagttgtatttttagcagacggttttgaagaagtagaaggtttaactgtagtggatcttttgagaagagcaggagcggttgtagaggcagtttctgttatgggaaaactgcagattgacggagcacatggaatacaggtggaagcggatgaattgtttgagaaagcattttttgatgacgcagaacttcttgtacttccgggaggtatgccgggaacactgcatctaaaagagcataaaggtctggcagacttactttgcaagttcaatgaaaagggaaagagaatcgcagcaatctgtgcagctccgactgtattcggagcacttggattgttgaaagagaaagcagcatgctgttatccggggatggaagaacagttgaattgtaaagaagcaaagttctgttcctttgtcacagatggaaatatcacaacaagccgtggtgtgggaacagcgataccattcgcactggaactgatccgtcagctttttggcaatgaaaaagcttctgaaatagcagaatctattgtatatgaggaataaaattagaaaaagtagtcagaaaaatgtaaaaaaacatgtaaaagatataggaaagtggaaaaaacactggaaatatgagactttatatgctatactgtttcaatgactgcgaatgtatacttttaagaaattaattcgttcgataagtaaagaatttgcttataaacaaggaggaagaaaatgagtttacaggtagaaaaattagagcataatatggcaaagctgacaatcgaagtttcagctgaagaagtagagaaggcactgcaggcagcttacttaaaagagcgcagcaaaatcagcctcccaggattccgtaaaggaaaagttccgcgtcagatgatcgagaagatgtacggaccggaagtattttatgatgaggcagcaaaccgcatgatttctgaggcatatgcaaaagcatatgatgagagtgaacttgagattgcttcccagccgacaattgatatcgttcagcttgagaagggaaaatcattcatcttcacagcagaagttgcagttaaaccggaagttaaacttggagagtacaaaggacttaaagttgacaaatactctacaagagtaacacagaaggaagttgacgaggagatcgagaaggttcgtgagcagcatgcaagaatcgttgaggttacagacagagctgtagcagataaagatgatgttacacttgatttcgaaggattcgttgacggtgttgcattcgaaggtggaaaaggtgagaactatccactgacaatcggatctggttctttcattccgggattcgaggagcagctgatcggagctgagatcgacaaagaagtagaagttaaggttacattcccagaagattatcattcagaagatctgaagggtaaagaagctgtattcaaatgcacagtacacgcaatcagagcaaaagagcttccggaagtagatgatgagttcgcatctgacgtttccgagaaggctgagacacttgatgcttacagagcagaagtaaaggcccagatcaaagagcgtaaagagaacgaaggaaaggctaagaaagaagatcaggctgtagagcaggcagttgctaatgcagagatcgatcttccagaaccaatggttgaccttcaggctaaacagatggctgatgattttgcacgccgcattatgcagcagggactcagcgtagagcagtacttccagttcacaggtctctcagaagagaagatgatggaagagcttaagccacaggctgagaagagaatcagaacaagacttgttcttgaagcaatcgtagcagcagagaatattgaagtatctgatgagcgtcttgatgaagagttagctaagatggctgagtcttacaagatggaagttgagaagctgaaagagttcatgggtgagaacgagaagaagcagatgaaagaggatattgcagtacaggatgcagttactctgatcgttgatgcatctgtagaaggctaatcatttattagatttcttgagagggtgcgcctgtatatcaggtgtgccttttctctttctataagaagtgagaggatgaggactgattcgggagtaaggatcagaacaataattatgcgttgctggtaataactattgcaaatagcgacaatcatatagaaaaggaaggatagcatatgagtttagtaccttatgtcattgagcagacaagccgcggagagcgttcctatgatatttattcaagacttttgaaggagcgtatcattttcctcggagaagaagtaaatgatgtgtcagcaagcgtgatcgttgcacagcttctgttcttggaggcagacgatccggataaggatatccagctgtatattaacagcccgggaggatctgtaacagcaggtctggcaatctacgatacaatgcagtacatcaagtgtgatgtttcaacagtatgtatcggtatggcagccagcatgggcgcattcctgctttccggtggaaagaaaggaaagagatttgcccttccgaacgctgaaatcatgattcatcagccatccggtggtgcacagggacaggcaacagagattcagattgcagcagaacatattcttcgtacgaagaagaaattgaatgagatcctggcagcaaatacaggaaagccgctggaagtgatccagcaggatacagagcgtgacaatttcatgtctgcagaagaggcgaaagagtacggtctgatcgacgaagtaatagtaaaccattaattggttattgaggtgacagaatatggcaggaaaaaagactgaggatatcgtaagatgctcgttttgtaataagacacagtcccaggttcgtaagatgatcgcaggaccgagcggaacctatatctgtgatgactgtgttgctatttgtaccgagattattgaggaagaattagattttaatgacagagctgcacttgacgatattaatctcctgacaccggaagagatgaaagcttttctggacgaatatgtgattggacaggatgaggcgaagaaagttctttctgttgcagtttacaatcattataagagaattctggcagaacaggatcttggagtagaacttcagaagagtaatatcctgatgcttggaccaacaggatgtggtaagacacttctggcacagacacttgcgaaagtcctgaatgttccatttgcaatcgcagatgctacagcactgacagaggcaggatatgtaggagaggacgttgaaaatattctccttaaggtgattcaggcagcagacggagacatcgagcgtgcagaacatggaatcatttacattgatgagattgataagatcacaagaaaatcagaaaatccatccatcacacgagatgtttccggagaaggtgttcagcaggcacttttgaaaatcatcgaaggaacagttgcgtctgttccaccgcagggcggaagaaagcatccacatcaggagttgatccagattgatacaacgaacatcttgtttatctgtggtggcgcttttgaaggaatcgataagatcattgagacaagaatcgatagaaaatcaatcggattcaatgcagagatcgcatcaaaacatgagtacgatatggatgtacttcttcaagaagcacttccacaggatcttgtaaagtttggtttgatccctgagctggtcggaagacttccggtgacagtatcattggatcttctggataaggatgcattgatacgcattcttacagagccaaaaagtgcgatcgtaaaacagtatcagaagcttctggagttggatggcgtgaagcttgaatttgataaagatgctctgttagaaatagcagagacaacattgaagcgtaagacaggtgcgagaggtctccgtgcgatcatggagaatatcatgatggatacgatgtttacagtaccgtcagataagacaatcaaggaatgccgcattacgaaggaagcggttcttggagtggaagaaccgaagtatactcgtgatagtgaggaaagaaaatcattcctgacatctgagagcaaatagtaactggatacaggaatcctgcaaacagttgcggagtataaaacgaggcgggagtgatgggagtaccatcctacccgccttttctaacgaggaggaattgaattggacaacgagacaagaagtctccctatggttgccttaagaggattaacaatcatgccggagatgatcgttcattttgatgtgagcagagaacgctccatcgctgcaattcaacaggcaatggttgaagagcaggagatatttctggttgcccagaaatcaatagagacagagaaccccggacaggatgatgtctatgagactggaacagttgcatctgtgaagcagctgatcaagctgtcaaagaaagttgtaagggttctcgtggaaggaaagaatcgtgcggttcttaagaaaattgaagagacagatccttatcttcgtgcagaagtagaagttctggaagaacaggagatcacgattccggatgatctgaatgcggaagcaatgatgcgcggattgaaggaaattattacagaatatgcagcaaagaatggaaagatttccaaagaatctgttgcagaaattcttgatattactgatttaaaacgtctggtaaatgaagtggctgcgaatattccattgaagtacaaggatcaacaggaacttctggaagagctggatttctggagcagatatgagaaattatcattgaagcttgtgaatgagatgcagatcatggaaatcaaagaagaacttcagagaaaagtaaagagcaaagtagataagcatcaaaaagaatatcttttaagagaacagctgaaggtgattcgcgaggaattaggtgaagatactacattttcagatgcagatgagttcgaagaagcatgtagcaaattagatgcaccggaagaagtaaaagaaaagctccataaggaaattggacggtttaagaacacgatcggttctcaggcagaaaatggagtaatccgtacttatattgagacaatcctggagatgccgtggaataaacgttcagaagataatacagatattaactatgcgaaagaagttttagaggcagatcattatggattggaacaggtgaaagaaagaatcctggaattcctggctgtcagaacactgacacagaagggggaaagtcctatcctttgtctggtgggacctccgggaacaggtaaaacttctattgcgaagtctttggctcgttctcttaagaaaccgtttgtgcgcatttctttaggaggagtacgtgacgaagctgagattcgcggtcaccgcaagacttatgtcggggcaatgccaggaagaattgcaaatggaattcgcacagcaggtgtgaagaatccggtactccttctggatgagattgacaaagtaagtacagactataaaggggatacgttctctgcacttttggaagtactggacagtgagcagaacagtaagttccgcgatcattatctggaagtgccgctcgatctgtcagaggttacatttatcacaacagcgaataccttacagacgattccaagaccactcctggacagaatggagatcatcgagattacaagttatacagaaaacgagaaacttcatattgcaatagaacatctgattccaaagcagctggaaaagcatgggattacagacgaacagctcagctttagcaagaaagcaatttggaaaatcgcacataactatacgaaagaagcaggtgttcgtcagttagaacgtgaaatcggaaatatttgccgtaaggcggcgaaagagcttcttacaaccgagaaagagaagattactgtgacagatagaaatcttcataaattccttggaaaagagaaatattcttatcagatggcaaatgcagcaccggaggtcggtatcgtacgtggacttgcatggacaagcgtcggaggagatacgcttcagattgaggtaaatgtaatgccgggcaagggagaaatcatgctgacaggacagcttggagatgtaatgaaagagtccgcccgtgccggaatcagttatattcgatctgtaagcaaaaaatatgcaatcgcagaagatttcttcgagaagcatgatattcatgtgcacattccggaaggtgcagttccgaaagacggaccatcagccggaatcacaatggcaacagcaatgctttctgctgtgacaggcaagaaagttcgcgcagatcttgcaatgacaggagaaatcaccttgagaggtcgtgtgcttccgatcggaggattgaaagaaaaacttcttgctgctaaaaatgcaggaatacagaccgtgcttattccaaaagagaacacagcagatgtggaagaactttcttctgaaattacaaaaggattggaaatcattccggttgagacaatggaagaagtcttaaagaaagcactgacaagataaaaagattgcttctgacagcagattgcaatagaatagaaagaaaggaggagtaaacgacatggtcattaaaaatataaatctggaaacagtttgtggaatcacaagcgttcttccggaaaacgataagcctgagatcgcatttgcgggaaaatcaaatgtaggaaaatcatcactgattaatgcactgatgaaccgtaagtcttatgcaagaatttcagcaacaccgggaaagacacagacaatcaatttctatacgattaatgaggaaatgtatctggtcgatctcccagggtatggatacgcaaaggtttctgagcaggaaaagattcagtggggaaaactgatcgagcgttatctgcatacatcaaaacagcttaaggcagtattccttttgatcgatatccgtcatgatccatctgcgaatgataaaatgatgtatcagtggatcctggatcagggatatcagccaatcattatcgcaacaaagcttgataagattaaacgcagtcaggtacagaagcatattaaaatgctgaagacaggtctgcagcttgttcctggaacaaaagtaattccattctcatcccagacaaaacagggaagagatgagatttgggaattgattgagacagaatatctcggatatggaaatgacgagggggcagaggatgacaaataagcgcccatactggcaagttgccgtaagcttgcttttcagcatagtagcaacagttggatttgtactgatcggatggaaattacttggatttctcatgccgtttgtggttggatggatcattgcatccatcgccacaccggttgttaactggttagaaaaacgtttgaagatcagaaaaaaattaggctccgcattgattattatcggagtcctggcgttgatggggacgctgggctactttgctgtcagttggctggtttcagaagtcagcagtctgatcaaagactttccggaaatgtatgtgcagctcgaaaaaggactccatcaaattggaatttctatgtccggaatttttagcaaactgccggatggaatccagaatggatggacgacaactgttgcgaatttggatgacacgatgggaaatctgatgtcaaaaatcagtgagccaacggtaagtgccgcaggaaatatcgcaaagcgtgtgccaagttatctggtatcaacaatcgttatggttatgtcttcttatttctttatctcagagcgagaagaagttgtgacatgggtcaaacagattgcgccaaagtcagtaactgaacgaatgatcatggtgatagataacctgaaatatgcggttggtggatatttcaaggcacagtttaagatcatgggaattgtatttttgattttggctgtaggacttggatttttgagagtccattactttgtattgtctgcatttttgatcgcatttctagatttcctaccattttttggaacaggaactgcgatgattccatgggctatatatgcagtctttatgggagattataaacgtgcgattatgcttgttgtgatctatgcaattacgcaaatcgtcagacagctgatccagccgaagcttgtcggagacagtgtcggattgaatccgctggttacactgcttttgatttatattggatatcgaattggtggtgtgatctggatgatccttgctgttccggttggtatggtcattataaatatgtgtcaggccggtgcgtttgattatatttttgatgatatgaagacgctgattgtcggaatcttgaaattaagagacgaagagtagtgtagttaagaaacaagaaagtaattgaaaggagaaaaatatatgagcaattatgatgtaattattatcggtgcaggacctgggggaatctttgcagcttatgagctggcagagaaagcaccggaattgaaggtggcggtatttgaagccggcaatccactggagaagagaaaatgcccaatcgatggaaagaagattaagagctgtgtgaactgcaagacatgcgcgattatgagtggattcggtggagcaggagcattttcagatggaaaatacaatatcacaaataattttggtggaacattgtatgagtatatcggtaaagagacagcaattgagctgatgaattacgtagatgagatcaatgtgaaatttggtggtgagggtacaaaaatgtattccacatcaggaacacatattaagaaactctgtatgcagaataagctgaatcttttggatgcatctgttcgtcatcttggaacagatatcaactatgtcgttcttgagaatctctatgcaaagttgaaagatactgtagagttccgttttaactgtcatgtagatgatgtggaagcgattgacggcggatatcgcgtgattacaaaagatggtgtagatgaatgtaagaaatgtatcgtttctgtgggaagaagcggaagtaaatggatggaaaaagtatgtgaaaatctcgatatcacaacaaaatccaatcgtgtagatatcggagtccgtgtggaacttccagcagttattttctcacatcttacagatgaactgtatgaaagcaagattgtctacagaacagagaagtttgaagataaagtcagaacattctgtatgaatccgaatggaatcgttgtaaatgagaatacaaacggaatcgttacagtaaacggacatagctatgaagatccggcgaagcagacagagaatacaaactttgcgcttcttgtggagaaacatttttcagagccgttcaaagacagtaatggatatggtgaaagtattgcacgcctgtctaatatgcttggaggtggcgttcttgtacagcgttttggtgatctgatccgaggaagaagaagtacaccggcacgtattgcagagagttttctgacaccgacactttccgcagaaccgggagatttgagccttgtattgccgaaacgtattcttgatggaatcattgagatgatctacgctttggataagatcgcacctggaacagcaaatgatgatacactgctctatggtgtagaagttaagttctacaatatggaagtgaaactggatgaacatcttgaaacaaaacacaagggcctgtatgtgattggagacggaagtggagtgacacattcattgtcccacgcatcagcaagtggtgtgttcgtagcaagagagattgcagaagaagtgtaaattgatagaagttaatagttaaaataaagggaagtttttcatttgcagaaattacatgaagtgtgtttgtgtattgcaggtgaaaaacttcccttttttcttatgtataaaaaagaaacttgagtttttgttgtttttacaaataaaacagttggattttgttgattcttaattaaagcgtgttgagatttattggaatctccttgacagaaaggcatatagatagtattatttatagtaagagagtttatagctgagactgggttactgttcactcccgtgtcaatcacttcgctgattgacacggaggatgcatgttttggcttgaatgcatctcgccccatcgccaaaggcgatttaaaatggcgagatacgttgctggtcacatcgtgtgaacagtaacgagactggctgtgaacagagaatgttagtggattaacatacaggattgtatgaatgagaattacagaatctatgtgaaagagaggaactgacagatggcgaatgatcacggagaacagattagaattgtacaggaaacagttgcaggtaaggagattacatttgcacatgtaatgggaggtccggctccgattatttatcagaaactcggattaaatccacatctggattatcgttcttctgcaattggagttatgaatatgactccaccggagtcagcagttatcgcatctgatattgcagtgaaaagcggtaatgtttatcttggattcgcagaccgttttacaggcacactgattattacaggagagatttctgatgttacatctgcattgacagaagttgtggattatttcagagattctcttggttatgtagtctgtgatattacaaaacgataggaagtgcgcttatggaacgggaacgtataacgagagaagagctcatggagcgtctgtttcatgatgactatgagaatctgaaaggaaagaagcttcgtatgactcgtgtgcgcgtgccggggaaggaagtctgcatggcgcatattatcagtagatcagatgaggttatttaccagaatctgggattacatattggaactcatgaaggtgaggatcacacaggagagtctatcggacttctgcgttttacaccgtgggaagcagttgtggttgctgcagatgtagcattcaagagcgcagatgttgagattggatttatggacagattctgcgggacactgattctgaccggcggattgatacaggtacagacagcggtggaagaagtagttcgattttttaatgagagacttggctttgcagtgtgcgaggttcatagaagttaagaagacagaggcgtaacaggatgaaaaagatatttttgatggggagaagtgaagcggggaagacttcactgacgcaggctcttaagggagaagaactgcattatgtgaagacacagtatacgaatacagaagatgatacgatcgactctccgggagagtatgcagagtctaagcatttcagtgttggacttgcctgtttttcatttgaggcagacgtgattgccatggtgcaggctgcagatgaaccgttcaatctgttcggacctggaagcagatgttttatccaacgtccattgatcggaatcattacaaagattgattcaccgtacgcaaatgttgatatggtgagactttggatgaagaatgccggatgtgagcgcattttcgaagtaaataataagacgcgggaaggtatcaaagagctcatagattatctgaatgagcctgtggaaatactgacattggatcgtgccagatataaacagtcattgggattgaatgactgggatccactaccggaaggtgtagagtatccggatggcatgtagatatcaaaagattaaggtgactgttcagagccaaccttcaaaatgctacgcattttgaaggtgtggcgtatccgccaaataaaatttcaaaaacagtcttaaaaatgcaagcattttacatctgtttttgaaattttgcttggctctgaacagttacaaattaagaaaaatatccctcttgagatgtttctggaagatggaatatgctataatgattatgtagcaatcagttcgatcaacagaatgacatcaggagggatttttatgttgtggacaagaagtgaattaaagggaagagcaaagttcctgttgaaacagaattattggtattctgttcttgcagcattgatttatacgtttcttttgggaaatggatttacgtattcttataatgcactaaagaataagaatagtgaggtggaaacttcgatacaaggttttcatccgatcctaatgtttgggattgcagcaactgtagcagttgtggttgtaatttcatttattgtatatctggctattgcctatttcctatggaatccaatgactgtcggctgttgtaaatttttcaaaaatggaagagacggaagacaggatgtgaaagacattttccgtatggtaagagattgcaataagacagtacgtatgacgatgcttctgaagacaatttatcttacattgtggtcactgttatttattgttcccggtgtgatcaaaggatatgaatatgcaatggtaccgtatcttctgctcgaccatccggagatgagcagacaggagatttttgcggagagcaaacgaatgatgatggggaataaatgggatgcgtttgtgctggatctttcctttatcggctggcatttgctgggagcatgtacgtttggaatcttaactttcctttatgtaaatccgtatcagtattatacagaggcagagttgtatcatgtgctgagagatagaatgtaaatatagattcatattatgaaacttagaataaaaagttcacggctggttgtagatgatcagctgtgagcttttcttttgcaaaataaaaatagaagacaactcaatattttctattgacattaaaaaccaatgtgataaacttgtttatgcaggaactgttcacaagtgaacaattcactggtaaacagttcctgcgtgtgaagatagaaaggaggattacaattttgtgtgaagaacattttcatatcggtccacaggtacataaaatggatcgttccatttcaaaattacttgaggcgagagtaaaagcggaagggttggatgaagtaacccttatgcatggatggattttgcgttatctctatgaacatcaggatgcagagatttatcaaaaagacatagagaagtatttcggaatctgccgttcgggagtgacgaatatcattcaggctttagagaagaaaggacttgtctgtcgtgcttcggttgagagtgatgcaaggttgaaaaaggttatgttgacagaggcaggacgcgaaagtcacgaaaagcttggagagattttcaagcgaatggacgcagaactggaagaaggaattaccgaagaagaattacaggcatttttgagagtgactcataaggttcatctcaatctaagaaaaatgagaggagagaattcatgattcgtactttattaaaagaagtaaaagagtataagacagcatcgatcgcgacaccgattttcatgattcttgaagttttatttgagacattgatcccgtttttgatggcatcgatcattgataaaggggttaatacgggtgatatccaccacatttataaagtgggtggaatcatgatcgtagcagcatttttaggcctgcttgccggaatggcgggaggacgttatggagcaaaggcttctacaggtttcgcaaagaatttgagaaatgcaatgtttgatcggattcagacatattcgtttgcaaatattgatcatttcagtacagcaggactggtaacgcgtctgacaacagatgtaacaaatgtgcagaatgcgtatcagatgatgttacgtatgatgatgagagcaccggcaagtatggtatgtgcgatggtgatggcatttgcaatcaatgcaaggctggcaagtatttatcttgtggcagtcttgattcttggaattattttgttttttattatccgtcatgcaactgcatatttccaacaggcatttccgaaatatgacgcattgaatgagtctgttcaggaaaatgtttctgcaatccgtgttgtaaaggcatatgtaagagaagaggaagagacaagtaaattcaaacgcgcaagcaagaatatttatgatatttttgtaaaagcagagaagaatgttatctggaatgcaccgatcatgatgtttacagtttacacctgtattattttaatcagctggttcggtgcgaaaatgattgttgtggattctcttacaaccggagaactgatgagtcttcttgcttattgtatgaatattcttatgagtcttatgatgctttcgatggttttcgttatgatttccatgagtatggcaagtatgcgccgtattgcggaagtgctgaatgaaaaaacagatattcacaatccagagcatccggtatatgaagtcgcagacggaagcattacatttaaaaatgtagacttttcttataagaaagacagtgcagagaaggttctcaaagacatcaatctggagattcgttccggagaaacgattggaattatcggaggaaccggaagtgcgaagacaagtctggtcaatctgatcagtcgtctgtatgacgtcacggacggagagattctggttggtggaaaaaatgtaaaagaatatgatcttgaggtgctccgtaatcaggtgtctgtagtgcttcagaaaaatgtcttatttacaggaagtattttagacaatctccgttggggagacaaagaagcgacagaggaagagtgtatccaggcatgtaaactggcctgtgcagatgaatttatcgagcgctttccggataaatataatacgcatattgaacagggcggaaacaatgtgtccggtggacagaagcagagactctgtattgcaagagcattgttaaagaagccgaagatcctgattcttgatgacagtacaagtgctgttgatactgcaacagatgcgaagatccgacgtgcattccgtgaagaaattccggatacgacaaagctgatcattgcacagcgtgtatccagtgttcaggatgcagaccgtattattgtgatggatgaaggaaagattcatggattcggaacacatgatgaactgcttgtgtcagatgagatttatcgcgaggtatatgagtctcagacacagggaggcggagattttgatgaaaatggaggtgaagcataatgcgcggaccaatgggaaaaccaaagaatagagtggaaaatcctggaaaattacttaaacgtctgatggattatattttccgggattataaatttcattgcattatagtattcatccttatttttgtaggagttattgcaaatgttcagggaacaatgttcacaagagatttgattgataaatacatcacaccgttcttattgtccggtgatacaccgaactttacaccgcttgcacatgcaatcggaaaagttgcttgtttttatggagtcggaattgtggcaacttatacttataaccgaattatgatcaatgtgacacagggaatgatgatgaacatgagaaatgatctgttcagtcacatggagaaacttccgattaaatatttcgatacacatgcgcatggtgatattatgtcaatctacacgaatgacattgatacactcagacagatggtaagccagagtattccgcagattatcaacagtggatttacaattgtcagtgtatttatcagtatgctgatcttgaatattccactgacagcagtgacgatggttatggttgcaatcatgatctggggaacaaagaaagctgccggacagagtggaaaatatttccttgagcagcagaagaatcttggtaaggtcaacggatatattgaagaaatgatgaacggccagaaggttgtgaaggtattctgtcatgaagaagaaagtaagacagaattcaaaaagttgaatgaggatctgtttgtaagcgcagatcgtgcaaatacttatgcaaacttcctcggccctatgaatacgcagataggaaatatcagttatgtaatgtgtgcaatcgttggaggtgcacttgctcttaaccatgtcggtggatttacattgggcggtctggcaagtttccttacatttaataaaagcttcagtatgccgatcaaccaggtgagccagcagctgaatgcgattgttatggcactcgcaggtgcggagcgtatctttacacttctggatgaaaaagtggaagtggatgaaggttatgttacattagttaatgcgaaagaagagaatggaaaactgatagaaagtgagaaacgtactggccgctgggcatggaaacatacacatcaggcggatggttctgttgattatgttgagttaaaaggaaatgttgtatttgacggagtggatttcggatacaatgatgacaaaatcgtccttcatgatgtgaagctatatgcagaaccggggcagaagattgctttcgtaggttcaacaggagccggtaagacgacaattacaaatttgatcaatcgtttctacgatattcaggatggtaagatccgctatgacggaattaatattaacaagatcaagaaagcagatcttcgacattctcttggaatcgtattgcaggatacacatttgtttactggtacagtgaaagataatattcgttttggaaagctggatgcaacagatgaagaaatcattgcagcagcaaagctggcaaatgcagatggatttatccgcagacttccggaagggtatgacacggtgatcaccggagatggagcaaacttaagtcagggacagcgacagcttcttgcgattgcccgtgcggcagtagcagatccaccggtattgattctggatgaggcaacaagttcaatcgatacccgcacagagcgtattatccaggaaagtatggaccggctgatgcatgggcgtactacctttgtgatcgcacaccgtttgtcaacagttcgtaattctgactgtatcatggtacttgaacagggaaggattatcgagagaggtacacacgaccagttgattgaagagaaaggtaagtattatcagctgtatacaggaaatgcaatatcagcgtagaagaaagtagagataaaaaagaactgaacccagataattaatgtcaatgggttcagttctttttgaaatagaaatcaacgttcagtaaaatctaaagcttcatgtgcaagtttacgttcagcttccccagcagaacggtatttcaaaagtaaattcacttcattttttgtaagaagaatgtcgttttcactattttcaattttaatacagaaatagttttttacttcaactgatgatggattctttgcattgcagtactgagtgataagcgagtcgacagaggtgtgatagatccaggatagttcagcaagaagttgaaggtttggttcacgtacaccggtttcataatttgaataagcctgatgagtgatatgcagctttttgccgatctgagcctgtgtgtagttatattgctttctcaaacgccgtagattatccgcaagttgaatatttgccatagtttcacctccgtttctatcatccgttaaggttcaaggatgtcttttccctcaatgagatattcataagaaacgtcgaagatctcagttagagctttcaattctatgtctgtaacgtaacgtttgttggtttctattcgtgtaattacatttttgtccatatcatatccgcgcaattggagtttgtaagctaaaagtctctgtgacatatggtgttgccgacgaagttcaatgagccttttgccgatcagattcttctctccggtagtaggtgttcgttttggcatagttctaatccctcctgcaaatagtgtgaacaggtttgtctcgttttttgcacttttaatgattttacatggaattgagtaaccaaatggttggaataatgagacaaatggaaaataattgtatgatttgtaatgattgatctctgaagatagtgtataatgtattctaaagatattttagagaactaggagaaaacacgccatgtatgaaataatgactgccgatgaagcaatccggctgattcgggacggagactgtatctgtgtgaattcatttgtcggaatagagaatccaattgaacttcacgaagcaatttacagaagataccagaagatgcagtccccaacacatctgacaatgatttccagtgccggttttggtgtctgggatgatgaacataatgcagaaggatacatcagagagggtgctgtggacaagcttatctgcgggcattttggagcaatgctcagtacaaagaaactggttttagaagaccggtttgaggcatacaatcttccgcttggatgcatttcacatgcaatccgtgcacaggccggaggtctcccgggtgcactttcaaaggttggcttggatatatttgtagatccaagaaaagaagggcctggaattaacagaatctcaattgatgattcactggtcaggcatgtggaagtggatggagaggaatttctctattataaattaccgaaaattaatattgcattgattaaaggaacagcagcagaccgaaagggaaatattacttttgacgatatgtttatgtccggtgatgcgctgtctatttgtcaggcagtaaaagcgaatcgcggcaaggtgatcgtacaggtagaccgcctggtggacaccccgtcacgaccgagaaatgcaattattccgggatgtctggtagatgcgatcgttgtggcagaaccggaagcaagaaatgaagcctatacagcactgactggaagctttgagattccatatgaagagtggaacacatggagtgagcgtttagattctgtctcagtgaaacagtcaaagaacaatacggtggcaaatatcatcggaaaacgtgcatcgaaggaattacgtgtagatgatattgtaaatattggaatcggcattccggagatggtttctcgttttgcaagaaagagtggaatgcttgatatggtgacattgacggttgagtccggaggaatcggaggatttccggtttcaggagaagcatttggagcaatgatcggtgcggcatctgtctatgatatggcaaaccagtttgacctttatgataatggtggtctcgatgtctgctttatgggcgcgcttgaagtggataaagaaggaaatgtgaatgcacaccgtggaccgggagcgtttgccggaatcggaggatttgcgaatatcacagctaagacaccaaccgttgttttctgtttcagctttacggcaaaaggactggaagtttcacagaagaaggggattgttgaaattgagaaggaaggttctatttcgaaatttgtagatcgagtcaagagtatcagtttttctgccagacgtgcaatcgcaaatggacagaaggtactttatgtgactgaacgctgtgtgtttcgcctgacaccgaaggggttgaaattgatagaagtatatcctggaatcgatgtgcagaaagatattttagatcttctgccattcgaagtggaagtatgatatagaaaatcaatgcaaaataagatgaagatttgttaaaatagttcatggacttcatcacgttaaattgatacaatttatccacaggacaacagaaaggacattattattatggaaaaaggtacaatttttaaatttcataatgatcttgatacagatcagatcatcgcatcccagtatctgcttctgccgaacttagatgagatgaagagccatacatttgaatcattggatccggattttgcaaaaaaagtaaaaccgggagatttcgtagtcggaggagagaattttggttgtggatcctccagagagcaggcaccgggtgtgctcaaagcacttggagtacaggctgtcattgcgaaatcatttgcaagaatcttctatagaaatgcaatcaatatcggacttccggtcattgtctgtaaggagcttccggatgaggtgaagacaggtgatacaatggaacttcgcatgtctgacggaacagctgaggcgaatggaaagacttattcctgtacaaagctgccggagtatatgcagaatattctgaatcagggtggactgatcgcttcactgaataaggaggactagaactatgggaatgacaatcgcagagaagatcatcgctgctgcagccggtgtggacagcgtaaaaccgggagatatccatacagtaatattggacagaatgatgagtaatgatggaacgacacatcttactgttgatatgtataataacaaattaaagaatcctcgtattgcagatccgaagaaactggtattcattgtggatcataatgtgccgtcagacagtccgaagacagcggcatctcagaagaagatgagagattttgcaaaagagaacggaattgacttctgggaaggaaagggtgtctgccatcaggttatgatggagaactatgtccgtccgggagaactgatcttcggagctgacagccatacttgttcctacggagcactcggagcgttcggtacaggtgtcggatgcacagacttcctttatggaatggtgacaggacagtcttgggtacttgttccggaatccgtgaaattcaatctgattggagaacttccggaaggtgtttatgcaagagacctgatcctgacaattatcggtcaggttggtgcgaacggatgtaactatcaggtgatggagttcacaggagaaggtgcaaagacactgagcatcagtgatcgtatcgcactttgcaacatggcagtagaagccggagccaagacaggtatctttgaggcagatgaaaaagcaatggaatacctgaaagagcatggccgtgagccgaaagctgtatttcacagtgatccggatgcgcattatatcagagagtatacaatcgatctttctaaagtggaaccggtcgtggcaaaacctgattttgtagataatttaagtccggcaaaggaagtgcgtggaattaagattgatgaagcatttttaggttcctgtaataatggacgtattgaagatcttcgtgtcggagcagaagtcatcaaaggaaaaaaagttgcagataaggtccgtttccttgttgttccggcaagccagacaatttaccgtcaggctcttaaggaaggacttcttgacattttcatggaggcaggtgcaattgtgatgaatccgaactgcagtgtctgctggggaagctgccagggagttattggtgaaaatgaagttctgatcagtacaggaacacgtaatttcaagggccgtgcaggacacccaagttcaaaagtatatcttggatccgcagcaacagttacagcatcagcaattaagggtgagatcgcacttgcatctgatctgtaaggtgatgggaacaggagataatttacacagagaagaacttatatattttgaggtgaactatggataaatttacaggaaaggtgtgggtactcggagatgatatcgatactgatatcatcatcccgacagagtatcttgcactgaaaacaattgacgatatgaaacagtatggattcagtccgcttcgtccggagctggcaggacagatccagaaaggtgatattatcgttgcaggaaagaactttggatgtggatcttccagagagcaggcaccggagatcatcaaagcacttggaatccagtgtgtgattgcaaaatcatttgcaagaatctttttccgcaattcaatcaacaatggtctgcttttgatcgagcagccggatctgtatgatgatatgaaagaaggcgacacaattgatgtcgtgatgaatcagcatgtagactataatggcaaagaatacccaatcgcttctctgccggagaatctgatgagtatcattcaggcaggcggacttgtaaaagctatgcgcaagctgaatggacttgaggattgagcagaaaggagagcatgatgggcgagacgattattgaaaagattatcagacataatacaggaaaggcagtaaagccgggagatatcgtgacagtcaatgtggacagatgcatgatccatgatattttcattccttttgtagcagataaatttgaagagatgggatttacaaagcttcacgatccggataaagtggttttgatttatgaccacctggttccggcaagccagcaggatgacacaagacatttccacaaaggagatgaatttgtagaaaaatatggactgactcacgtacatagaagcgacggaatctgtcaccagttgatgacagaagccggatatgtgaaacctggagatatcgcattcggaacagacagccatacgacaacttatggttgtgtcggcgcattttcatccggaatcggttatacagaaatggcaagtattctcggaaccggtacaatgtggatcaaagttccagagacgatcaaagttgtgattgacggagaacttccggaaaatgtaatgtccaaggatatcattctccgactgatcggagatctccgtgcggacggagcaacctacagagcactggaattctcgggaagcacgattgagaatatgtcagttgcaagccgtatgacaatggcaaacatggcaatcgaggcaggagcaaaatgtgctcttttcacaccggatgagaagacggcagaatattgtgagattgaactcaacgactaccagaaaagccttgttggagatgaagatgctgtctatatgaagacaatgacatataaggcagaggatttcgttccggttatggcatgtccgtcccaggttgataagatcagaaatgtcagtgaactggaaggaacagagattgaccaggtatttatcggatcctgtacaaacggacgtctggaagacctcagagctgcagcagaagtactcaaagggaagaaagttgcagactttgtgaagctgatcgttacaccggcaagccgcaagatctacagacaggcactggcagacggaacgctggatattttggcagaagcaggtgcgatcattacacatccggggtgcggattgtgctgcggaagaacaggaggaatcctttctgacggagaacgagttgtagcaacgaataacagaaacttccttggacgtatgggaacatctaaggtagagatttatcttgcaagtccgagaacagcagcggcatgtgcagttgccgggaagattgtgaatccggaataagataatatagaaatataaaaagctatcgattacaacaattaagatgaaatgtgttgtaactgatagcttttttcgtaaatgttgcaactgtttttctaattgacaccttctaatgattttgttatagttaattcacatcaaaatctcagacatatattttctatatttcatttgtctgaatgtgttatcgaaaggataactttatctcatattcaaggctgtatcagcaggagattccattttgatgagttacaaaataacaaaagaataagaaaccaggaggaagggtctatgggaaaagcagatgttaatgtgaatatctggttaagcgagaagaaaagatttgcaaatttatttaatggtgtgatttatggtggaagacaggtgatattgccggaggatttggaagaagtaaatcccgtttcatctatcagcgtaaaaaatcgggccgggaaaacaaagaacatgaaaaaataccgcgatattattatgaaatggcggaatcaggctacgcttgtgcttcttgcgaatgaatcacaggataaaattcattatgcgatgccgcacaaggtgatgctttatgatggaatggattacgaaacacaaattcggaataattggaaaaactttaatgaccgacgaaaacagaacaaaaaagcaggacagccgttggagcatcttaccgcaggagaatatctgtcgcgatttcgaaaaaaagatcgattgataccgattatttcattagtcttttactatggttcaaagccgtgggatggacctgttgatctgtatgatatgtttcagttggagggtacgaaagaagagaacgaaattttggagaaatatcttccgaactataaaatcaatcttgttgatgcagaacgattgaaagatgttgaaaaattttcgaatgatttacaagtgatactaactatgctaagatatagggacagtaaggaagaattaacggattacattaacgagaataaaaagttttttcagaacgttgattatgaaacaagccaggcgatgaaagcttttttaaacatgaaacaaataccaggtgaagcagaacataaggaggagatgattgatatgtgtaaggcaatacaggaaatgtatgatgatggagtgaaagatggaattcagaaaggtgtagaacgtggaatagcagcagttattagaacgtgtcggaatttaaatgtttcagaggaggatactcttaataatgttcagagagaatatgagctttcaatggaagaagcaaagaaatatctggagacgtattggagataactagaggtaagaaaaataaaaagctattgattacaacaattatagatagatgtgaattattaaagtgctccggttgcagaaatgtagccggagatttttgtaacctttttaataaaattttcggctaataaatgtaaacataacaaaggaagtggtgacgtgaaattatatatgttgttgtttacgaaatgaggaagagtggacaaaaaagaggaaatccgaattgtcaaaaaggcaattaagggaaaaccagatgcatacggacaattgatttcggactttgactcgtttgatcgcgtaaatgcaaaagggaaagcgattctttaaccgctttcccttaattataactgcttggaattaatctccccaaatgctatatgtatttcggatacttacagaatatcaatatactccccggccagtgccttattcatacttcttactgcacagaactttccacacatactgcaagtatcgctatggtcgtcctccggttttctgctgtcgcggattgcttttgcagtttcaggatccagagcgcattcaaactgtgcatcccagtcaagaacacggcgggcatctgccatcttatcatcgatatctcttgctccaggaattcctttggcaatatcagcagcatgagctgcaatcttagaagcaatgattccctgttttgtatcttcaacatttggaagagcaaggtgttcagccggtgttacatagcagaggaaggaagcaccgttcattgctgcaacagctccaccgatcgcggaagtgatatggtcatatccaggagcaatatctgtaacgataggtccaagtacatagaaaggagctcccatacagatggtctgctgtactttcatgttcgctgcaacctgatcaagcggtacatgtccaggtccttctaccataacctgaacattatgatcccaggcacgttttgtcagctcaccgagacgcacaagctcttcaatctggcatacatctgtagcgtcagccagacatccaggacggcatgcatcaccaagggagattgtcacgtcatattcttcgcagatatcaaggatttcatcatagtattcatagaatgggttctcttctcctgtcatgctcatccatgcgaatacaaggcttcctccacggcttacaatgttcattttacgtttatgctttttgatctgttcgattgtttttcttgtgattccgcagtgaagtgtaacgaagtcaacaccgtcttctgcatgcatacggatgacatcaaggaaatcctgtgcagtcagagtagcaagatctctctgataatgaatgacactgtcgtatacaggaactgtaccgatcatagcaggacattcagaagtcagtttgcgacggaacggctgtgtatctccatggctggaaagatccatgatagattcggctccaagttctactgcgctcattactttctgcatttcaatatcataatccttgcagtcacgggaaactccaaggttgacattgatctttgtgcggagcatgcttccgacaccttccgggttcagtgctttatgattcttgttagcacagattgcaacctttccttcagcgacaagcttcatcagtttgtcagtttccatatgttctttttcagctactgttttgatttccggggtgagaattcccttgcgggctgcatccatctgggttgtgtagtttctcatgttgttttgcctccattcttacatgtgaattgatagattttatgacgtcagcaaaacacggacagcgtacacgagaaaagctactacctcctgcacatgaacgaatgtggacaggagatgtaactattaacctacacttccagtgaatgagtagaaaaattatgctgacgccttcagcggagagatgttaataactggaaaataaagaagttattagcggaaaactccggtgattacagattgattctgcattttcttgtgcggtacaaggtggtgcccccaatgtatcgcatgtaactgttcggaaattttgcagttacggattaagaagtcggaaaaagctgtgccattactccacttttctggaatactgaaatcagcaggaatgccaggatacttccggctactgttgagatcaggaatgggatcacatagataaataatcctgccggtgctgctcccataaggaataaagcaaccggataagcagcaattcctccgagaatacctgttccaagtgcctctgcaagacaagtaaggcttaaattcttacatttcttgtaaacaagtccacagcagagagctccgatcatactacccgggaaagccatcagacttccgattccaagtatgttgcgtagaaggcttgcacagaatgcaattccaacgccccagcctggaccaagaagtacggctgcaaagatatttaccatatgttgaaccggtgcacatttacttccggctataggaaagcttaaaaagcttccaacgatggcaagagcggtgagaacacctgcaagtgccagtttttttgtgtttgttgtctgtttcataacttgagtctcctttcaaatgtaaaaaaggatcctcacctgagtgaagatcctaccagctgtccgaagtaaaaagagatgcaagggcatctcaatcattacatggtatcaattccctccgttggcattatccaaatcaggtttaaacgggtcgaaacggtaacacgtctcctctcagccggttctgaccagctcccctttgacaatatttagttctttgtctgatgctattatgaaccgaaaaagtgaaaaatgcaagaggaaaatttgaagcaaaaggagaaaaaatttaaatcaggtttaaaattataagaagctgtattgaaaaataaatagaaaaacaatacaacttcttatttttatatattattacataaaaaacagaagaaaaagattgggtatactgcgaattgtattgtaacatgtattgttgtatattaagtatatgaagaaaaagtactgatcagagcaatgataatcagaacactgtaagtgacaacggtaattatgattaattgtatagagaggtcataagcgaatgaaaaaatttgaaaaaatagtaacctggattcgggaggaagtcaggtcgggaagaatggtttccggagagaagcttccttcagaacaggaactatctgaacaatttcaggtcagtcgtcagacggtacgacgggcattggaagaattagtaaaagagaatattgtggaaagcagacgcggaagtggctcttatatatgtgaagatgcgggaatccttcttggaaatacagaaagaagagcagatcatgaagaaaaacgaatcgtagtaatgctgacgtatatcgatacctatattttcccaattattgttcgggaaattgagaaaaaagttactcaggcaggcggaatccttcagattgcgatgacagataattcggttgcaaaagagcggatgcatttagaagaatttttgagaacaagaagaattgacggattgattgcagaacctgtgaaaagtgggcttccgaatccgaatttagatttatatcagaaattacagaaatcaggaataccggttttgtttgtgaatagtttctatgagaatctcacaattccgcatgtcagtctggatgatgagaaagcaggctacattgcaacgaaacaccttttggaatgtggacatacaagaatagcaggaatcttcaaggcggatgacgggcagggaagaatgcgatatgcaggatacacaaaagcactcatggaacattcacataaaatcaagaatcggcagattttatggattgattcagaagatatccgtgagatggagctggtaagtgaaaggattttaaagcggttaaacggatgtacagcctgtgtctgctacaatgatgagattgcaagtaagttgattcaaatcttgcaaagtgcagatttgcaggtgccagatcagatttcagtgattggaattgacaattccagtcttgcaagattttgtgaagtaccgatcacatcggtgaataatccggcgaatgagattggaaagtgtgcagcacagattatattggataagattgataaaaatatggaaatgtactcagcggaatttgcgccggaacttgtgatgcgaaattctgtgaaattatataatgaagtcatgtagacagcagacgaaaggagaagaataatgttagaacagttaaaaaaagaagtgtatgaggcaaatatgctgcttccaaaatacgatcttgttacatttacatggggaaatgtaagtggaatcgatcgagaaagcggactttttgttattaaaccaagtggagttgaatatgataagctgactccggaagatatggtggttgttgatctgaatggaaataaagtagagggacgttacaacccatcttccgatacaccgacacatgttgttctttataatcgttttccaaaaatcggtggtgttgtacatacacattctgcatgggcaacaagctgggcacaggcaggaagagatattccatgttatggaacaacacatgcagattacatttatggagaaatcccatgtgtacgtaatctgacgaaagaagagatcgaggaagcatatgagaagaacacaggagttctgattgcagatgagtttgaagctaagaagaaagattatattgcagttccagcagttctttgtaagaatcatggtgtatttacatggggtaaagatgcacacgaagcagttcacaatgcagttgttgcagaagaagtggcgaagatggcagcaagatgtgagatgatcaatccgcaggtaaaaccggctccgcaggaacttcaggataagcattactatagaaaacatggtgcgaatgcctattacggacagaatacagcaaaataataactgtcaagtataacacagtaacaaattaagtgataaataaaaaataactatgaacattttattacaaggaggacacaaaaatgttaaagaagaaagagtacaaattctggttttgcacaggttcacaggatctttatggagatgaatgtctggcgcatgtagcagagcatgccaagattatcgtagagaagctcaatgagtctggagttcttccatatgaagttgtatggaaaccaacattgatcacaaacgaactgatccgtaagacttttaatgaagctaatattgatgatgaatgtgccggtgtcattacatggatgcatacgttctcacctgcaaaatcatggattcttggacttcaggagttcagaaaaccactgcttcaccttcatacacagttcaatatggagatcccatatgacacgatcgatatggatttcatgaatgagaaccagtcagcgcatggtggacgtgagttcggacacattttcacaagacttggaatcgagagaaaagttgttgttggacactggtcagacgagaaggttcaggagaagatcgcttcctggatgcgtacagcagttggtgtgatcgaaagcagccatgtacgtgtcatgagagttgcagacaacatgagaaatgttgctgttactgaaggtgacaaagtagaggcacagattaaattcggatgggaagtagatgcttatccggtaaatgaaatcgcagagtctgtagatgctgtaagcgcagcagatgtaaatacattagtagaagagtattatgacaaatatgagatccttcttgaaggaagagatccggaagagttcagaaaacatgttgctgttcaggcacagattgagcttggattcgagcgtttccttgaggagaaaaactatcaggcaatcgttacacattttggagatctcggtgcactcaaacagcttcctggacttgcaatccagcgtctgatgcagaagggatatggatttggagctgaaggagactggaagacagcagctatggttcgtatcatgaagatcatgacagaaggcatgaaagatgcaaaaggaacatcgatgctggaagattatacatataattttgtgcctggaaaagaaggaatccttcaggctcatatgcttgagatctgcccatctatcgcagatggtccgatcagcatcaaggtaaatccactttctatgggagacagagaagatcctgcaagacttgtattcacatcaaaagaaggaaagggtatcgcaacatcactgatcgatcttggagatcgtttccgtctgatcatcaatacagtagactgtaagaagaatgagaaaccaatgccgaagcttccggtagcaacaaacttctggacaccggagccggatctcgcaacaggagctgaagcctggattctttgcggtggtgcacatcatacagcattctcttatgatatcactgcagaacagatgggtgactgggcagcaatgatgggaatcgaagctgtatatattgataaagatacaacaatccgtaatctgaaaaatgaactcagatggaatgaacttgcatttagaaaataaaaaatcattaagaggataaccttcaatacttaaaaatttatcgaaaattcattgaaatgaagaaaacgaaaaggtataatatctaattagaaaaaaagtctccgtaaatctgtccgctaagaaaatgcaaagcagacagatttgcggagcaaaaaggagtttaagtatgagtattaaaattggtattttaggttatggtaatcttggaagaggcgttgagtgcgcagtaaagcagaatgatgatatggagcttgtggcagtgttcacaagaagaaatccggaagatgtcaagattctgacagagactgcgacagtttgtaatgtagcagacgtagaagactggaaagataagattgacgttatgataatttgcggaggaagtgcaacagaccttccaaaacagacacctgtttacgcaaagatgttcaatgtaatcgatagttttgatacacatgcaagaatcccggagcattttgcaaatgtagatgcagccgcaaaagaaggcggacatgtaggaatcatctccgtgggctgggatccgggaatgttctccctgaatagactgtatgcgaatgcaattcttccggatggaaatgattacacattctggggcaaaggtgtaagccagggacattctgatgcaatccgcagagttgaaggtgtcaaagacggaaagcagtacacaattccggtagaggctgcactgaaagcagtaagaaacggagagaatccggaacttacaacaagacagaaacatacaagagagtgtttcgttgtactggaagaaggagcagatgcggcgaaggtagaagaagagatcaagacaatgccgaactacttctcagattatgatacaacagtacactttatcagtgaagaagaactgaaagcaaaccacagcggaattccgcacggtggatttgtactccgcagcggaaagacaggatgggatggtgagaataaacacctgatcgaatatagtctgaaactggattccaatccggaatttacatcatctgtactgatcgcttatgcaagagcagcttacagactggcaagcgaaggacagagcggatgcaagacagtatttgatattgcacctgcatacttaagcgcaaagagcggagaagagcttagaaaacatatgttataaaatcggatgcggcgatgacttacttaaatgagttatacgccgcattttttataggagggcaaaaatatgagaggaaaagaagagattaagaaaacaatcgaagaaggaaaagcggtgcttggaattgagtttggttctacaagaatcaaagcagttttaattgatgaggataaaagtccgatcgcatccggaagttatgactgggagaatcagcttgtagacaatgtctggacatacagcatggagaaaatccagaatggtcttcagggatgttatcaggatcttgtgaaagatgtagaagcaaaatataatgtgaagcttacaaaatttgcagcactcggagtcagcgcaatgatgcatggatatcttgcgtttgatgagaatgatgaattgcttgttccgttccgtacctggagaaatacgatcacagaagaagcttctgaaaaactgacagagctcttttcttatcatattccgcagcgttggagtattgctcatctgtaccaggcaatcttaaatggtgaagaacatgtaaaagatgttcgttatattacaacacttgcaggatatatccattggaaactgaccggcaagaaggtgctcggaaatggtgatgcagcaggaatgttcccaatcgatatagctactaagaaatttaatgagaagatgatggatcagtttgatgaacttacagcagagaagaatttcccatggaagatccgtgaaattcttccggaagttcttgttgctggagaagacgcaggtgtattgacagaagaaggcgcaaaactgcttgatcctacaggaacacttcagtccggaattccaatgtgtcctccggaaggagatgccggaacaggaatggttgcaacaaacagcgttgctgtccgcacaggaaatgtatctgccggaacaagtgtatttgcaatggcagtacttgagaaagacttgacaaagccttacgaagaaattgaccttgtaacaactccggccggagatcttgtagcaatggtgcactgtaataactgtacatcagatctgaatgcatgggtgaatctgttccgtgaatttgcagagagtatgggaatgacagcagatatgaaccagatttttggaacactttataacaaagcattagaaggagattccgattgtggcggacttctggcttacaactatttctcaggagagcatattacaggatttaacgaaggaagaccgttgttcgttcgtaaacctgatagcaaatttaatcttgcaaactttatgagagtgcatctttatacttctcttggagcattgaagacaggaatgaatatccttctgaaaaaagaacatgttgcattggatcgaatgatgggacatggcggattgtttaagacaaaaggtgttggacagagaatccttgcaggagcaatcgatacaccggtttatgttatggagacagcaggtgaaggtggtgcatggggaatcgcactgcttgccgattaccttattaagaaagaggacaaggaatcgctgacagattatcttgagaacaaagtattccatgatgcagtgggaacaggaatggatccggttgcggaagatgtggaaggatacgagaaatttatggaaacatatgctaagggtcttgcaatcgagaaagcagcggttgaaaatttatagttacgtgtgtttctggacggtggcagatgaagtggaaatgatattttcaaggggctgtacatggtatcccatctcttcccatctggtcagtagttcatccaggatttcagcattagtggaagatgtgctgtggagcagaacgatagctccgggatgaatccttccgaggagtttggagaaagcttcttctttggatggctggttatcctgataccagtctacataggcgagactccagaagaaacttttgtaaccaagttcttttgccatttgaagattagcttcactgtattttccctgaggaggccgatagtatttggtcatattctttccggttacgtttttataggcagtttctacatagtccagttctttttggaaatcttctatagaagaaatatgggacatgtcggggtgatgccaggtatggtttcccacggtgtgtccttcttttattatctgtcggatcagttcaggctcagagtcaatgtaggttccgacaacaaaaaaagtggcttttacctgatgttttttcagtgcatcaaggatggcagatgtatttccgttttcgtaaccggcatcaaaagtaagatacagaactttttcagacgtatcctgtgcgtaataagcatccatagatgcaagttcctggatcgaagcatttccaacaggagttttgccttcttcctgaaaacttaacccccagtttccttctgaagaaagtgtgagatcaggaagggcacaggaaatcgtccggggaatagaagtcacggagttctggttgacaggagaggggcgagccgaagttgactcattagaaaaagcgaaaatctgttctttaagaaatccagctccaatacctgaaaaataagagaagataagaaataaaatacaatatttttttgatttcaaagggtgtatgggaaaatggatacatttccgggaaagagagagtttcattcgttcacctcggaaaatcgttaatagaatatatgaaattgtatttctttttatacttgttgagcaggcaaaggaatgatatactaatccggtaattgtattgtatcccgcaagttgggaatgataacaaggaggaattgaataatgaaaacaaagaaacatgacactcgttggatggttagtgttgcacttatggcagcgatcgtgatcgtactggccaatacaccgcttggtatgatccagctccctatcattaaggcaacaacagttcatattccggtgatcctcggagcaattctgttaggacctggtgcaggagcaattcttggagcagtttttggtatatgctctctggtcagtaatacaatggctccgacactcttatcctttgcattttcaccatttttaagtacaaccggaattcctggggcgttgaaggcaatctggatatctgttggatgcagaattctgatcggtgtggtagcaggatggctgtgggtactttttacaaagattaaactgaatcagtttattgcacttccgattgtgggatttgttggttcaatggtgaatactgtcactgtaatgggaagtatttatttcctgtttgcacagcagtatgccgaggcaaaagaagttgcacttacagcagtcttcggtctggtgatgggaactgtgacagcatctggtattccggaagcaatcgcagcagcaattctcgttcttgcacttggaaaagtacttgttgtagttttccgcaagatgaaccttggggctgtgaatgtggaatctgcaaaataacagacgaatttaaaaatagaagaaagtaatgaatcatgaagaagttaaatgaatgtggaattaagactgttatcagcttataaagttacaaaatagtaacaaaaccacaagaaagcaacttctttatgttgttttttgatgaattttaattgctgttgtagttgattaagtgtcaggtgtgtattataataaagctatatgatatgcaaaaactgttggaagatcagaacagcagaaagaagaggagaaaaatatggcagaggattacagaaaccaggcaatcggcgtatttgaactggaaagtgagtgtatctgttttgtagcacttgatgcggcagcaaaagcagcagcagtaaagattcagggtgtggagagaaatcgtcttgcggcaggagcctgcgtgaagatgagaggaagtgtctctgacgtgaaggctgcaatggaagcagcactggatgtagccagaccgttgacgaagattgtttcccatacggtgattgcatcaccttctgaggatacggaaaaagcaattgcaatgacaattaataaataggtatttgttcaattgtctgttgtacatatgagaagagtattgttttgtgaggaaatcagagaaggaaaagaaagggaaataagatgaagaaatatggagcatatggcctggtagaggtaaaaggagaatccaatgcggtgatcgtagttgaccgcatgttaaagactgcagaagtagagtatgtgacacaggacacaaagtgcggtggacatgcacttgtttttgtaggtggcagtgtatcagcagtaacagcagcggttgatgaagtgaaaaataatgcaccgtgtaaagttatacaaactgctgtaatctccaatccgtctcaggagatggttgacatagtagaaatgtttaagaatagataagagttaggattaagtaaaatggaaagagcaatcttgttttttgatattgatggaacagtgttgagtgaagtgacaaaagaggtaccgcaaagtgcgattgaggcaatggaaaaagcacgagcggaaggacatctgctgtttattaatacaggcagaacaatctgtagtattccgacagaggtgagaaaattccaatttgatgggtatttatgtggctgtgggacatatcttacagaacatgatgaagttttgctaaaaagctcgattgagaagcagagaggtatagaactgctgcgaaaagcaaaagaatgtaatcttggtgttattgcggaaggacaagaggattgttattttcctgggcacatatcacgatttgacaggttagaatctacaagaagatattttgcatctagaggaataggaatcgaacagtctttagagagcgaaagatttgaatatgataagttgtttgtttacgtagatgataagagtgattttgattcttttcgtgagtatcttggagatgacatggaagcacttgaccgtggcggaaaggcctatgaggtaattcagaagggattttctaaagcgacagcatgtcagtttattatggaaagatatgacatggatgcaagtcatgcgtatgtcttcggagacagcagtaatgatctggcgatgtttgaatatgcggagcatgcgattgcgatgggcagacatgattcggtattggattcatatgctgagtttgttacaaagacagtggaaaatgatggaattgcatatgccatgaagcattatggattaatttaacagaaaatagaaaacaggatctgtcagtaaagataaaactggcggatcctgttttttatatattaggaaagtcctttcctaatatataaaaaacgctccgctcaggatgcgcactgcggcgtacaaggtaggtgtcgcaagcgaacgccgcaggcgcaagaatgtgccaaggcacattctttgttcataaagtatttctgttatacaataccggcaccgtcaaagaagctgacatctgttggatatacatagctgtctccaatgtcatgaagaagtacaacattcaagtgattattcaggttctttttatccaaagaaattgcatcagtcagtacatcaatcggtaaattagagttgtccggaagtttataaatctccaatgcctttttgatctgttctgcgcatccggatgtggttaatcctttctcttctgcaatctttgtaatctgatacataccaattccaacagcctctccatggctttcgcgctcataattgaagtgctgttcaatcgtgtgcgcaagtgtgtgtccaaagttcagaagaatacgttctccaaggtcaaactgatcggcttcgacaacgattcttttgatatcaacgcagcgcgcaataatctgtgtcagcttcggctttaaatcatcgaaggaagtatgtctacataaaagctcaaaaagctctttgtctttgatgcatccatatttgatcacttcgcccattccatcactgatgaaatgatctggcaatgtattcagcacatctgggtcaatgatgactgcctttgggtgataaaatgcaccaacaagattttttccctgcggaagatctaccgcaacttttccgccaacagaggaatcaacctgtgcgaggagtgaagttggaatctgtacaaatttgattccacgcagataactgctggcagcaaatccggcaagatcaccgatcacaccgccaccaagtgcgatgagcaggtcacttcgtgttagttttgcatttattaatgcttcatagatcttaggcagagactggaaactcttagtaggttcgccgtgaggcagaacaaaagagtggcattcaaaccctgagtcagacaatgcttttgtgataatttctccatagagaggaaaaacattatcatctgaaacgatcatgatttttttcccggagaacacttcgcttacaagttctccggtttttgcaaggattccattttcaatatggatcggataagaattcggtccaagatcaactgttaatttcatgacgatctccttagaattttttaccgactacttcggcaatttgacgaacttgctgaagcagaacatcatatttctcaggtttcaaagattgggctccgtcacaaagggcagcttccggattgttgtgaacttcgatcataagtccgtcagcacctgcagcaactgcagcctttgccataggctcaacaagccaccattttccgccggcatgacttgggtcaataacaatcggaagatgtgtcttgctgcgaagaacagggatacactgaagatccagagtgtttcttgtaaaagtctcaaaagtacggataccacgttcacagagaatgacattttcattaccggatgccatgatatactcagcggacatgatccattcttcgtatgtggcattcagtcctctctttaacaggattgggcgatcaacctgtcctaattctttgagaagatcaaagttctgcatgttgcgggcaccaatctggatcaggtcaaccttctcgttgaatacatccagatacttggaagacatgagttctgtgacaataggaagtccgacttcttctctgactgcacagagaatatcaagtccctcaagtccgagtccctggaaagcgtaaggacttgttcttggcttgaatgcgccgccgcggagaagatttgctccggatgtttttgctttttgagcaatctcaagaacctgctcataggattctacagaacaaggtcctgcaatcagtcctaaatgttcaccgccgatcttaacaccggaaacatcaataatagagtcttccggatgaaatgcgcgatttgcaagcttataaggctcctgtacatgcataactttgtcaacacatgtgtcaatttcaaattgtcttggatcgatcagtgttgtatctccgatacatccgatgatcgtcattccggttccctgaaccagatgagtgtcaagtccgtgcttttttacaagattttcgacacggtgtatattttcctcagaagtatgaggtttcaaaacaataatcattttttatcatcctccttaatattcgtactgtaaaattttagttgtttaaagtgcgaaaacatatgtatcataaaacatatacaattagatgtcaatgtcttttggattatttgaagaaatatatcaaaaaaacatgcaaaatagtgtgattatttcatgaataatcacattgacggatagagtgcgcagtgctaatctaaaaagcgtgtcatgtaaagagagagttctccaggcatgagattgacagaaactgacgaaagaattgtttctggaacttgacatgtaggcttacatattaaaaagaggtaaaacaaatgaagattttaaaacagtttggtgtgatattcggtgtttgctgggtcagtcttgtaatcgaacattatctgccgttttcttttccggcgagtgtgatcggtatgattttattgttgatctgtctgctgaccgggttcttaaagattgagcatgtgcaggaaaaagcagattttttattaggaaatatggcattcttttttgtaccggcaggagtaagtatcattaattattttgacattttaaaaagtacagtgcttcagcttcttgtaatctgtgttgtatccacgattgtaacatttgctgtgacagcgtatgtagttacgctgacagtgaaattgatggagaagaaaaagggaggaaagaaagcatgaaagaattaatgacatctccttattttggagtagggttgagtgtagtagcattctggataggagaaaagctgcataataaattaaagacaccgatctgtaatccactgatcgttgcgattgtattgattgtaggagtccttttgatttttgatattccatatgatagctatgatgtgggcggggctttaatcaatatgttccttgctccggcaacagcatgtcttgcggttgcaatttatacaaaaattgatgttttgaagaaatactggcttccaattgtagttggatgtactgcagggtcagcagcatctatggcaagcgtgtttggaatgtgcaaattatttggactggatcagagcatgacagtttcactgattcctaagtcagtgacaacacctatcgcagtgagtatttctgagccggcaggtggtgtagtgccgattacggtggttgctgttattttcacggggattcttggaagtattctggctccgacgctgatcaaaatattccatgtgaaggattctgtggcagcaggacttgcaatcggtgcatgtagtcatgcggtcggaacatcaaaggcaattgaaattggtgagatcgagggtgcaatgagcggtcttgcaatcggaatctgtggaattattacagtgctgttttcaatgcttattatgtaggcgaatttaataatcatgaaaagaatcgatttcatcaggattttcgtatagaaacattgcctgaaagaaatcggttcttttttttgaaaaaaataaggatttcacgcttcggtcatgacaaatgtggaaacttatgttatactctaagttaggttagtgccattatactttgaattatggtttgtgtgaaaaagacagaacaggcactgaaagatagaatttaaaggagctatacggtatgaaaagagtattgttaaagctgagcggagaagctcttgcaggcgagaagaagactggatttgatgaggcaacttgtatcggagttgcgaagcaggtaaaacagcttgtagatgaaggtgtgcaggtagcaatcgtaacaggaggaggaaacttctggagaggaagaacaagtgagacaattgaccgtacaaaagcagatcagatcggtatgcttgcaacagttatgaactgtatctatgtgtcagatattttccgtcatgtaggaatgaagacagaagtattcacaccttttgtatgcggagcatttacatctctgttctcaaaggatgcggcagttgcagcactggaagaaggcaaggtgatctttttcgcaggtggaacaggacatccatatttctcaacagatacaggtgcagttctccgtgcaatcgagattgaggcagatgcaatgcttcttgcaaaggcaattgacggtatctatgacagtgatccgaaggtgaatccggcagcagtgaagtatgatgaaatttctattcaagaagtgatcgatcagaaactcgcagcagttgatctgacagcatccattctttgtcttgagaataagatgccgatgcttgtattcggacttaatgaagagaatagtattgtaaatacaatgcagggaaaattcacaggaacaaaagttactgtataaactattttaaatagcggaggaattacagcatgaatgaaaaaaacaaaatctatgatgataagatgacaaagacaattaacaatctggatggagaacttgctacaatccgtgcagggcgtgcaaacccacatgtactggataagctggcagttgattactacggaacaccaacaccgatccagcaggtagcgaatgtatctgtaccggaagcacgtatgatccagatccagccatgggagaagagcatgctcaaggcaattgagaaagcaattcttacatctgatatcggaatcaacccgacaaatgatggaacatctatccgtctggtattcccagaactgacagaggatcgcagaaaagaacttgcaaaagatgttaagaaaaaaggtgaggaagcgaaagttgctgtacgtaatgtccgtcgtgatggaaatgttgctttcaagaaactgaaaggaacggaaatttctgaagatgagatcaaagatcttgaagatgaacttcagaagatcacagacaagtatgttgctaagattgacaaaatggtagaggcgaagtccaaggaaatcatgacagtctaaatcgaaaaacagcagagctgaattgtcagattgtaatgtggaaaaactgtttacagattatttgtacgcagataagtttttaagaacatggaggcttatttaaggcctccatttcttctttaaagaaagttgcgacagagaggataagaaaatgaacgtaccacagcatattgcgattattttagatggaaacggacgctgggcaaaatcaaaaggaatgccgagaaattacggacacgcacagggagccaagaacgttgagaagatctgtgaagaagcatggcgtataggaatcaagtacctgacagtctatgcattttctacagaaaactggagcagaccacagaatgaagtggatgcactgatgaaacttttaagaaattacatgaaaacatgtctgaagacagcggcaaagaatgatatgaagatccgtgtgattggcgatattgaaccgctggatgaggatatcaagagccggatcagagaactggaagaggcaacagccaacaatggagggcttaattttacaattgccctgaattatggaagccgtgatgagatcacaagagcagccagaaagcttgcgaaggattgtgcggccggcaaggtaaatccggacacgatcgatgaatcattatttaattcttatctggatacaaatgacattccggatccggatttgatgatccgtacaagcggagaacaaagattatcgaattatctgctttggcagctggcctattcagagttttattttacagatattccgtggccggcatttacgaaagaagagcttataaaagcggtggaagaatataaccgcaggcatagaagattcggcggagtagaggaggcggaataaagatgtttaaaacaaggttactaagtggaatactattagtgatcatcgcgcttgtcacagtgatcacgggcggaaacctgctctttgcagttttgttattaatcagcctgatcggaatgacagagttgtataaagtatttcacatagagaagaaggcaccaggaattgtcggatatatttttgcaatcctgtattatgggttattatattttaaaccgcttcttccgggagaatccttaaactggtttgttatgttgtttatggcttttttgatctgccagatggcggttcttgtatttgcctatccgaaatataatacacagcagatttttgcaggtttttttggaatgttctatgtggcagtgatgctctcttacatttatcagacaagaaatcttccgggaggaatcttctcggtatggcttgtatttgtatgctcctggggatgtgatacttgtgcatactgtgtcggtatgttgatcggaaagcacaagctggcaccgattttaagtccgaaaaaatcaatagaaggtggaatcggaggaatccttggtgcagcattgatcggagtattgtatggacttgcaattaactactggggaaatgcggcggcagatttattgcaatatgcgatcattggtgcggtcggtggagcaatttcacagattggggatctggcagcttctgcgatcaagagataccacaacattaaagattatggaaaactgattccgggacatggaggaattcttgaccgttttgacagtgttatctttacagcacctattattttctatctttccctgtttctgtaaaaggagatatatgtgtgatagatgcgttgctgatccacagttttgtggattgtaacataagagcagaatagaggtaaaaagttacgatgaagaaaattgcaattttgggatccacaggatccataggaacacagacattggagattgtcaggacaaatggcgatctggaggttacagcacttgcagcagggaataatattgatctcctggagaaacagatcagagaatttaagccgaaactggcagcagtttggaaagaagaaagagcaaatgaattaaaagacaaaataaatgatctggatgttaaagtagtaagcggtatggatggactgcttgaagtagcgagacagccggagtcagagattcttgtgacagcaattgtcggaatgattggaattcttcctacaattgaagcaattaatgcaggaaaagatattgctttggcaaataaagagacactggtcacagcaggacatatcattatgccgctggcaaaggaaaaaggggtttctattctcccggtggatagtgagcacagcgcaatctttcagtctcttcagggaggacagcagaaggctctgcataagattctcctgacggcatccggtggaccatttagaggaaagaaactggaagatctggcgaacatccaggtagaggatgcattgaaacatccaaactgggcaatgggacgcaagattacaattgactcatctacaatggtgaacaaaggtcttgaagtgattgaggcgaaatggctctttggagtggatgtagatcagattcaggttgttgtgcagccacagagtatcattcattcaatggtggaatatgaagatggtgcagtgatcgcacagcttggaacaccggatatgaaacttccaatccagtatgcactctattatccggaacgtcgttatcttccgggtgacagactggacttttcgacacttcagcagatcacgtttgaacagccggatctggaaacattttatggattgaagcttgcttttgaagcgggaagaacaggaggttcccttccgaccgtgttaaatgcggcaaatgagaaagcagttgcgctgttccttgacagaaagattaagtatctccagattcctgaaattattcaggcgtgtatggaagcgcataaaaatattgcggctccaaccgttgaggagatactaaagacagaacaggaaacatatgaatttattaaaaacaggtggtaatgtatgggcataatcttggcaattctgctattcagtgcgattgtaatctttcacgaattaggacactttctgcttgcaaagaagaataagatccgtgtggatgaattctctctgggtcttggaccgactatttttggaaaacagtttggagaaacaaaattcagcttaaagcttcttccgtttggcggagcctgcatgatgggagaagatgatgtggatgatatgtctgaagggagctttaacagcaaatcggtctgggcaagaatgtcagtaattgttgcaggtccagtgtttaatcttattcttgcatggatcctctgcatgattattattggctggacgggatatcgagcaccgattgtcagtaatgtgacagatggatattcagcgcaggaagaaggtatcgaaccgggagatgtgatcaagaagatcggaggaaagtcagtttatatctggaatgatatcagtctgtataatatgatgcatgcgggaacaaaaagtgtagaagttgagtatgagcgtgacggtaaggattatacagttgtgctggaaccaaaacagaatgagggagatgcttttcctctgcttggaattacaggtggtgagatggttcgtccgggtctgtttggaacagttcgatacggagcatatacggtgaagtattggatcacatatacagttgacagtctgaaaatgttagttggtggaaaggtaggagtaaaagatctttccggtccggttggaattgtcagtgcggtagataacgtttatcaggaagcagctccggcaggcatggtagtagtgattttaaatcttctcaatataggagtacttctgaccgccaacctgggtgtgatgaatctgttaccgcttccggcgttggacggtggacgtcttgtattccttatcattgaggccgttcgtggaaaaagagtaccgcctgagaaagaaggcatggtacattttgcaggatttgtgcttctgatggcattgatggttgttattatgtttaatgacattctgaaacttgtgtagaaaacaggaaagaataggagtttcccgcatatactggaaaaaggaaacgaatcagatgtgggagacaaactatgaaactttttcaaccgatacaaggttcaattgaaagcaaagaaacgcaggagaatctgatcgatcgtggtcagctgcaggtaaatgttacatcttctgtgaatgcatttccagtaaaagaagcacggatttccatctcttatacaggaattccggaaagtatattagagcaggtagtcacggattcttccggtcagacagaactgattgaattgaatgcaccaccggaagaatggagtctggatgagaacgaagaacgtcaaccatattcagaatatacattgaatattgaagcagaaggatttgagtcgatcagtgtttcgggaacagagatcctggcaaacacaaaggcaatccagaatatacgcatgaaacaaaaggatcagagcagggaagaagagcaggtattcgtcatccctgctcatactttatatggaaattatcctccgaagattgcagaggaagagattaagccggtaaatgaaacaggagaaattgtcttgagccgtgtggttgtaccggaatatattatcgtacatgatggatctccgcgggattctacagcacagaattattatgtgaagtacaaagattatataaaaaatgtcgcatcaagtgaaatctatgcaacctggccggcagacaccataagggcaaatgtactggcaattatgtcattcactttaaacagggtttatacggaatggtatcgaaataaagggtttgattttacaattacatcatcaacggcatttgaccataaatggatcccggagcgcaatatatttgagcctatttcagtgattgtggatgaactgtttgcagactatctgtcacggccgaatgtgcgccagccaatcctgacacagtattgtgatggccgcagagtgagttgtccaaactggttgacacagtgggggtcaaaaagtctgggagaacagggattttctccgattgagattctaaggtattattatggtgacgatatgtatatcaatacggcagaagcaatctcaggtattccgtcttcctggccgggatatacactggaacaaggttcacaaggtccaaaagtgcgtcagatacaggaagaactgaatgtgattgcgggggcatatccggaaatccccaaattgacggaagatggaatctatggacctgaaacagaagcggctgtccggaaatttcaatctatattcggtcttccggtaacaggagagatagattataaaacatggtataagatatcggaaatttatgttggcgtgtcaagaatagcagagctttcataaagtacaggaacagttcagacaggagacagtgaaattaatggaaagagacagaagacgaaggaaaaaacgacgaagaaatagaaaaacaacaaggaaaggattcgtgtttcttgtgcttcttcttgtgatcatcggagcggcaggtgtattaaagatgacaaaagcagtacccggattattccgtgagtctggaaatgtccttttgtctgattctggtcagaaaatagaatttccggagttaaatgtatcagaagaagatgttgtagatggtttttattatcagcagctgtcggagcaggaaaaacaggtttatcgtgagatcctgcagggggttcgttccatggaagagaccattcttcttcatgcaggcgagaatgacgaggcaggaaagatatacgaatatctgatgtatgaccggccggaattgttctggtgtgacggcagctcaaaaatgacggtatacaaagactacacagagtttcatccgtcttatatctgcacacaggaacagagagaatccagacgggagcagattgaaaatgcggcacaagaggcacttgcaggtgcgcagggatgtgagacagaatatgagaagatcaagtacattttcaaatatcttgtagatacggtggattatgatcaaaacgcattggataatcagaatatttatagttctttggttgggaaaaaatccgtctgcgcaggatattccagggcagcgcaatatctgttgaaacagatgggaatagaatgtatttacgttgtgggaacagtaaaagagcagggggcacatgcatggaatatagtgaaatgtgatgataagtattatcagatggatgtgactttcggagatccgatttttcaggagaatgagacgggagaaacgctacctcatgatcttgtgaattatgagtatctatgttgtacagatgaagaaatttttacagatcatcagcaggatgattttgtgccgtatccggtgtgcgattccaatgatctggaatattatcgaatcaacggtctgtactatgaaacatttggtgagaatgaaatctatgaaaaaatgaaagcagggatagaacagggacaggaaatgtttgccatccgcttttcggaaaatgctgtttatgaagttgcaaaagagaaaattatagataatttgattccacaggcggcgcagtttcttgttgacttcagacaattggaagaagtgaaatatacgtatgctgtggatgacagaaagcggatcataatgatcttctggtattcataaaaatgcataaaacaccatttataagtaaaaaataccaatatatattaataaaagtactaagttattcatcaaaaatgatgttgaaatgtctctcatgctgtagtataatctttacaatttgagaaagagggcgctctggaataaagactccatgagcgccttccttttgagaaaaaatatttttacgaagggaaagggtgaacagatgaaagcgtttcttattttggaagacggtactgtgtttacaggaacaagcattggttcgacgagagatatgatcagtgagatcgtgtttaatacttcaatgacaggatatcttgaggtactgacggacccttcttatgcgggacaggcagtggttatgacatatccgctgattggtaattatggaattacaccggatatggagtcattaaaggcatggccagatggatatattgtgagggagttatccagaatgccaagtaacttcagatgtgaaggtacaattcaggatttcctcaagaaatatgatattccgggtattgcgggagttgatactcgtgctcttacaaagattttaagagaaaaaggtaccatgaatggtatgatcacaacaaacgagaattacgatcttgatgaagtaatctctaagttgaagaattataaggtagaaggtgttgtctccaaagttacatgtgcggagaaatacgttttagaaggaaaaggtaagaaggttgcacttcttgatctcggagctaagaaaaacatcgcaaaatctttaaatgatcgcggctgcgaagtgaccgtttatccggccgatacaacagcggaggagatcatcgcatctaatccagatggcattatgctttccaatggacctggagatccggcagaatgtacatcaattatcaaagaaatcaaaaagctttatgaaacagatatcccaatatttgccatttgccttggacatcagttgatggcacttgcaacaggtggtacaacttacaaattaaaatatggacatcgcggaggaaatcatccggtgaaagatcttcagacaggcagagtctacatttcttcacagaatcacggctatgttgttgatgaagataagattgatccaaacgttgcagttcctgcatttaagaatgtaaatgacggaacaaacgaaggacttgcatatgttggaaagaacatttttacagttcagttccatccggaagcatgcccgggaccacaggattcaggatacctgttcgatcgttttcttgagatgatgggaggagagaaataatgccaagagataatagtatcaaaaaagtattagttatcggttctggtccgatcgtcatcggacaggctgcggagttcgattatgctggaactcaggcctgccgttcactgaaagaagaagggattgaggttgtacttctcaactcaaaccctgcaacaatcatgacagataaagatatcgcagatcgtgtttatatcgagccactgacaattgaggttgttgagcagctgatcaaaaaggaaaaaccagacagtgtacttccaacacttggaggacaggctggactgaaccttgcaatggaacttgaagaggctggattcttaaaagagaataatgtacgcctgatcggaacaacatctgagacaatcaagaaggcagaagaccgtctggagttcaaggcgacaatggagaagatcggtgagccggttgcagcttctctcgttgtagaaaatgtagaagacggacttgcatttgcaaataagatcggctacccggttgttcttcgtcctgcttatacactgggaggaagcggtggtggtatcgcgcatgattctcagcagttagtagagatccttgagaatggtcttcgtctttcccgtgttggtcaggttcttgttgaacgctgcatcgcaggatggaaagagatcgagtacgaggtaatgcgtgacggagccggaaactgtattacagtatgtaatatggaaaatattgacccggttggagttcatactggagacagtatcgtagtcgcaccttctcagacactgggcgataaagaatatcagatgttacgtacttccgcattgaacattatcagtgaactgaacatcacaggtggatgtaacgtacagtatgcattacacccagagacatttgaatattgtgtaatcgaggtaaaccctcgtgtaagccgttcttctgcacttgcttccaaagcaacaggatatccgatcgcgaaggttgcagcgaagatcgcacttggatacaatctggatgagatcaagaatgcaatcacacagaagacctatgcaagttttgagccaatgcttgactacgtagtagttaagatcccgagacttccatttgataaatttatcagtgcgaagagaacactgacaacacagatgaaagcaaccggagaagttatgagcatctgtaataacttcgagggagctcttatgaaagcaatccgttctctggagcagcatgtagacagtctgatgtcttatgacttcacagatctgacagatgatgaactgatcgatcagctgaagaaagtagatgacatgcgtatgtggagaatcgcagaagcatgcagaagaggaatctcttacgatttgatccacgagattacaaaagttgatgagtggtttatcgataaatttgcaatcatcacagagatggagacagctctgaagacacaggaacttacaccggagcttcttgcagaagcaaaacgtatcgagttcccggataatgtaatcgcacagctgacaggtaagacagagcaggaaattcacgatatgcgtcatgcaaacggtatcgttgcagcatataagatcgtagatacttgtgcagcagagttcgccgcagagacaccatattactactctgtatatggaagcgagaatgaagttgaacagacaaaagataagaagaaagtacttgttcttggatccggtccgatccgtatcggtcagggtatcgagttcgacttctgttctgtacattgtacatgggcatttgcaaaagacggatatgagacaatcattgtaaataataacccggagacagtaagtactgactttgacattgctgataagctgtacttcgagccactgacaccggaagatgtagagagtatcgttgatattgagaaaccggacggagcagttgtacagtttggtggacagacagcaatcaagctgacagaagcacttatgaagatgggagtaccgatccttggtacatctgcagagaatgtagacaaagccgaagaccgcgagctctttgatgagattcttgaagagtgcgagattccacgtccgacaggtggaacagtattcacagcagaagaagcgaaagaagttgccaacagacttggatatcctgtattggttcgtccttcctacgttcttggtggacagggaatgcagattgcaatcaacgacaatgatattgatgaattcatcggaatcattaacagaatcgcacaggatcacccaatccttgtagataaataccttcagggaaaagagattgaggtcgatgcagtatgcgacggaacagatatcctgatcccgggtatcatggaacatatcgagcgtgcaggaatccactccggagacagtatttccgtatatccggcacagagcctgacagaaggagcgaaagcaaagattgctgagtatacaagaagacttgcaaaatcactccatgttatcggtatgatcaatatccagtttatcgtgtgcggcgaagatgatgtatatgtaatcgaagtaaacccacgttccagccgtacagtaccatatatcagtaaggtgacaggtatcccgattgttcctttagcaacacaggttatcacaggaaagaagatcaaagatcttggatacacaccgggacttcagccggaagctgattatgtagcggttaagatgccggtattctcatttgagaagatccgcggagctgatatcagccttggacctgagatgaagtctacaggagagtgtcttggaattgcaaagacatttgatgaagcactttacaaagcatttatcggagcaggaatcaagcttccgaagcataaaaacatgatcatgacagtccgcgatgaagaccatgcagatgcagtagagatcggaagaagatttgagaagattggataccatatctttgctacaagcggaacagcacgtgcgctgaatgaggcgggagtaaaggctactccggttcgtaagatcgagcaggaatcaccgaaccttcttgacctgatcctcggacataagatcgatcttgttatcgatatcccggcacagggtgcagagcattcaagagatggatttgtaatccgtagaaatgcaatcgagacaggtgtgaatgtactgactgcaattgacacagcatatgcattgatcacaagtcttgagaatacagatattaagaaactgtcactgatcgatattgcgaaggtgcagtaagatttgttgaaccaggattctttcaattgggatctaaaatttaattgaatggtcgcaatgccagttctactattaccacgggtatcagcccgctttacctcatccctttgaaagtatgtaacataagagcaagaacagtttaccgtatgtggtgcctgttcttgctcttattaacattctgaacaaagtgtattcggaaaacaaatattatcaaggcttcagcaacattacgaaacgattattctactatttccaatcttgcaaggtcaacgagtgaaccgatttatataacaaaaaatgacgaggatgacggagtatttatgaatattgatgcctttgagaaaagggaacaggcattggaatttcgtgcgaaaatcatgcaggcagaagaagaaaggttaaacggagcaaagacaagaagtatctccgaagcaagaaagaaattgagagaacgtgcaggaacaatataaagttgaaattcttccgattgcatgggaagatttgaaaagtgttgaggattattatttacttcgattcggtgtggaatctgcaatgaaagtgacgaatcagatattgaacagtaactcttcaacttccgtaattaaagagctgcttgtcactcctatataaacgaggtataatgaatttatcaataagcagtctttttaaagaacgaaaataaagttatttcacatagtactttttataaaatcaggactgcggaaaaggaggactcaaatatgaagatagacatgcactgtcacgtgaaagaggggtccatagacagcagggtagggattgaggaatatatcacgatactcaaggaacacggatttcagggaatggtgatcacggatcacgacacatataatggctaccgctactggaaaaagaatttaaaaggaaagaaacataccgattttgtggtactcaaaggaattgaatatgatacgagagatgcagggcatattcttgtaattatgccagagggtgtaaagatgcgtctacttgagatgcgtggaatgccgcttgcacttctgatcgatttggttcaccgcaatggtggagttttgggaccggcacatccatgcggagaaaagtacatgagcttcactcatgcgaggagatactacctctcacctgagattgttaaacgattcgattttattgagacattcaattgttgtgaaccgaaggattctaatgctggtgccttaaaactggcagagaaatacggtaaggtgatgaccggtggaagtgattcccacaagacagactgtgtcggacgggcatatacaatcttacctgaaccggtcaaaacggagacagagctaatctctttgatccataagaagactgcattcaagacaggtggtgtctattataataagacgacaaaagagaagatcgggaaggtaaataagctccttgtatattccttctgggtatacaacaagagcggcgagctgatgaaacgtcgtgggcggaataagaaaatggaagaagaacatccatttgatccgattgatccgatcgaactgtattatcactcataattgtttctggatagttactatgctttcctgtaagccccaggtgaaataccatattttcttttgaaaatgcggttgaagtaggacaggttgtcaaaaccactggcatcagcaatcatcagaatagagtcatcggatgatttgagaagtctggcagccattgtaagtcggtaatcatttaaatattcagtgaatccgattcccatgtgggctttgaagaacttcatgaaatgggatttactataataagtaagttcagccatgtcatcaatcgttagtttttctgtataatgattttctacgtattttaaaacagttttcattttctccaaagatttggaattggaggaagtggagactgtttttttctgacgttcagagatcagaagaaagaaaaagttaaacagagaacttttcacagcaagctgccatccaggtgtctgatcagcacagacaaggtcaatctgtcggatacaattgcttaaggcttcaaaagatccgagagccggagtgagaaaatattcaatgggaagagaaccgtcaagaagcggaacgatgtattgaatcatgcacagatcgtttgctccggaagaaagtaaatctggtttgaaaataatattttcatattccattttaaaagtatcatcctgttcgatggcatggagacatctagggggaataataataatatctccactgtgaaccagacgcttatcaaagtccacagaaacaaaaccctgccctcttttaatgacaacaagttccaactcatcgtgccagtgcagtggtactccagggaaatcgagagggatcgagcagagataagtattataaggaaattctgcggatgtatgcgcttttgtttcatggtaattctgatattcgttaatgttcatgtaaaaatgagatcctttcaataaaatgttatctgacacacctactggtcaaactagattgaattataagaatgatagtattgtacaataaagtgcaagtatattgcaagatatttgaagataatcgtattaaaatacaatcataagttgaaaacaaagaaacaaagtatgtaacataaaaacagaatcagatttgaagggagattattcaaatgaacattcaggaaacattacagcagaaacttggtaaagagattgcacaggcttccaatgaagaaatctacggagcacttcttagtatggtgcaggaaatggcaggagaaaaggaacgtacagatagtaagaaaaaactttactatatttccgcagagttcttgatcggaaaactgctttctaacaacatgatcaaccttggtatttttaatgaagtaaaagatgtacttgcacagaacggtaagaatattgcagagatcgaagaagtagagccagagccgtcacttggtaatggtggacttggacgactggcagcatgtttccttgattcaatcgcaacacttggacttgcaggagacggtgtcggactgaactatcatcttggactttttaaacaggagtttaaaaataaccttcagagagaaactccgaatccatggattgaagaaaaatcctggctgaaaaagacagatgttgtttatccggtatctttcaaaggacttaatgtaaatgcgagaatgtatgatattgaagtaacaggatataacaataagacaaataaattacatctctttgatattgactctgtagatgagacaatcgtagaggatggaattgcttttaataaagaagacatcgagaagaacctgacacttttcttatatccagatgacagtgatgagaacggaagactgcttcgaatctatcagcagtatttcatggtaagtgcaggagcacagctgattcttgatgaatgtacagcaaagggatgcaaccttcatgatcttgctgattatgcagtgatccagatcaatgatactcacccgacaatggtaattccggaactgatccgtcttcttgtagagagaggattagacatggatgaggcgatcgaagttgtttctaagacatgtgcatacacaaatcatacaatccttgcagaggcactggaaaaatggcctgtatattacctgaagaaggtagttccgcagctgatgccgatcatcgaagtgttggatgataaagtaagaagaaaatatgaagatgaaagcgtttctattattgacagaaatgatacagttcatatggcacacattgatatccattacggattcagtgtaaacggtgttgcttctcttcatacagagattctgaaagagacagaactgaataatttctacaagatttatccagagaagtttaacaataagacaaatggtattacattccgtcgctggttactacattgtaatccggctctcacagagcttcttgatgaactgatcggagagggatacaagaaagatgcagctgaacttgagaaacttcttgcatttaaggatgatgagaaggttcttgacagattagtagagattaaacatgcaaataaagaagcactctgcaaatatctggaagagacacagggagtaaaagtaagccctgatacaatctttgatattcagatcaaacgtctgcatgagtacaaacgtcagcagctgaatgcattatatatcattgataaatatcttgagatcaaagcaggaaagattccggctgcaccggtgacagctatctttggagcaaaggcagcaccggcttatgtgatcgcaaaagatatcattcatttgattctttgtctgcaggagatcatcaacaatgatccagaggtaagtccatacctgaaggttgttatggttgagaattataacgtaacaaaggctgaaaaattaattccggcttgtgatatttctgagcagatttcacttgcatctaaagaagccagtggaacaggtaatatgaaattcatgctgaacggagctgtaacactcggaacagaggatggagcaaatgttgagattcatgaactcgttggaaacgataacatttttgtattcggtgcatccagtgatgaagtaatcgagcattatgcaaaggctgattatgtcgcaagagatttctatgagaagaatcctgcgatcaaggcagcaattgactttattacaagcgaggaagttctgaaagttggagagaaagagaatcttgagagactgcagcatgagattatcagtaaagactggttcatgactcttcttgacttcgacagctataaagaaaagaaagaagaagcattgagagcttatgcagatcagaaaacatgggctaagaaagcacttgtaaatattgcaaaagcagggtatttctcatctgacagaacaatcgaagagtacaacagagatatctggcatctgtaagaggaggagaagaacgtgaaaagagcgagcggagtattattaccggtattttcattgccatcaaaatacggaattggctgtttctcaaaagaggcgtataaatttattgatcagttaaaagaggctggacagagttactggcagattctgccgcttggaccgactggatacggggattccccgtaccagtctttctccacatatgctggaaatccatattttattgatctgaagacactgatcaaagaaggacttctgacaaaaaaagaatgtaaagtgtatgattttggagagcaggcaggcagtattgattacgaaaaaatctacaattcaagatttaaagtgctgaaaaaggcatttgagcgtttcgaaaaagatgaagcatatgataactttatcaaagaaaatgcgtattggctggatgattatagtctttacatggcaatcaaggacagcaaaggtggaattagctggaatgaatgggaagaagccctgaaaaaccgcgaggaagcagcacttgagaatgcgagagaagaacttgcagaagagattgatttttacaaattccagcagtatgaattcgataaacagtggtcacagcttcacgcttatgcaaatgaacagggaattcagatcgttggagatattccgatttatgttgcatttgacggtgcagatacatgggcatctccggagttattccagtttgatgaagagaataatccggtggcagtagcaggatgtcctccggatgatttttctgcaacaggacagttgtggggcaatccgctgtataattgggaatatcataaaaagacagaatacgactggtggattaagagaatccgtcattgtctcaaattatatgatgtagtaagaattgatcatttccgtggatttgacgaatattattccattccttatggaaataagacagcagtggatggaacatggatgcctggcccgggaatggatctgttccgtacaattgaagaaaaacttggcaaattgaatattattgcagaagaccttggattcctgacagaaagtgtacttcagatgctatccgacagtggattcccgggaatgaaagtaatacagtttgcatttgatccaaatggaggctctgcatatctcccgcataattatccggaaaacagtgttgtatatacgggtacgcatgacaatgatacaacaagaggatggtatcacagtacagataaagcgacgcgagattttgcaaaagagtatatgaatgcacaacgcctggatgaagatgatctggcgtgggatttcatccgacttgcaatgagcagtaaggcgaacctttgcgtaactccgatgcaggatttactgaacctggatggaaaggcgagaatcaatgtaccgtctacacttggcggaaactggacctggagaatggagaagggacagtttgatgaagagacggtgaagagattgaaacgtatgacatggttgtacgaacgtcttccgagagaagttgaaaagaaaataaaatagtaaaagagagagactgtgttgagcatggtctcttttgttttttgattattattcagacgtttgcaaaacagctgttttggctatcggatctatttgttagagttggggaacgcagatgctaatttttcagaatattctgaattgcatgaaatatataaaaaacattgacaattaaaaacagctgtgataagataaccttcgtcgctgaggaacagcaaagaaaacaacagaggaacggaagatgaaagaagacgcggaggcgggacattcttgatcggaaggaaactggaagatttaaaaatcaatgaaatgattgaaaaataaatcaaaaaagttgttgacaaagagttctgaaagtgatatcctaaataggctgtcgcgtgagacggcaaaggaaagctcgaaaagagtgacaaagaaaaataaaaaagttcttgacaaagacaaaggcttttgataaaatatgaaagctgtcgcttgaaaagaacgacacagacaaagaaccttgataactgaacaatagacaacaacaacccttgaaaatttctttaagagaagatttttaagaacggtttttaaacaaaccaaaacaacagtaaaaaggaaagaattagctagttagttggttctgaactggatacaaacacttttaacgagagtttgatcctggctcaggatgaacgctggcggcgtgcttaacacatgcaagtcgaacgaagcaccttgatttgattcttcggatgaagatcttggtgactgagtggcggacgggtgagtaacgcgtgggtaacctgcctcatacagggggataacagttagaaatgactgctaataccgcataagaccacagcaccgcatggtgcaggggtaaaaactccggtggtatgagatggacccgcgtctgattaggtagttggtggggtaacggcctaccaagccgacgatcagtagccgacctgagagggcgaccggccacattgggactgagacacggcccaaactcctacgggaggcagcagtggggaatattgcacaatgggggaaaccctgatgcagcgacgccgcgtgagcgatgaagtatttcggtatgtaaagctctatcagcagggaagaaaatgacggtacctgactaagaagcaccggctaaatacgtgccagcagccgcggtaatacgtatggtgcaagcgttatccggatttactgggtgtaaagggagcgtagacggagtggcaagtctgatgtgaaaacccggggctcaaccccgggactgcattggaaactgtcaatctggagtaccggagaggtaagcggaattcctagtgtagcggtgaaatgcgtagatattaggaggaacaccagtggcgaaggcggcttactggacggtaactgacgttgaggctcgaaagcgtggggagcaaacaggattagataccctggtagtccacgccgtaaacgatgactactaggtgtcgggcagcaaagctgttcggtgccgcagcaaacgcaataagtagtccacctggggagtacgttcgcaagaatgaaactcaaaggaattgacggggacccgcacaagcggtggagcatgtggtttaattcgaagcaacgcgaagaaccttacctgctcttgacatctccctgaccggcaagtaatgttgcctttccttcgggacagggatgacaggtggtgcatggttgtcgtcagctcgtgtcgtgagatgttgggttaagtcccgcaacgagcgcaacccctatctttagtagccagcggttcggccgggcactctagagagactgccagggataacctggaggaaggtggggatgacgtcaaatcatcatgccccttatgagcagggctacacacgtgctacaatggcgtaaacaaagggaggcagaaccgcgaggtcgagcaaatcccaaaaataacgtctcagttcggattgtagtctgcaactcgactacatgaagctggaatcgctagtaatcgcgaatcagaatgtcgcggtgaatacgttcccgggtcttgtacacaccgcccgtcacaccatgggagtcagtaacgcccgaagtcagtgacccaaccgtaaggagggagctgccgaaggtgggaccgataactggggtgaagtcgtaacaaggtagccgtatcggaaggtgcggctggatcacctcctttctaaggaagaaatgctttctttcgtctggaacaatccaactaaaacggaagaaagaagtagagagttttactgttgtctattgttgggttatcaagtaaccaaactttttggtggcgatgcgcttaggggtaacacccgttcccatcccgaacacgatggtaaagacctaagcggccgatggtactgcactggagacggtgtgggagagtaggtggccgccaaattaaaagaaagaaactaaggcagagacgctgccgaagttgaacatatagatacaggcaaagatgagcaacaacttatcgccgccaacccaatcagcagggcagtgctgttatgatagctggtttcaccagtgattagatatacaaagagatttgtgtatgtaatgactgatgaaagtcggtcaagatgcgaagctctaaaacctacggttttatcgctcatggcattacatgccaatgcatcgaaaagcatttgcacttagacaagcaagcttgtcacgtacaactgttttcgatacgctcgcatctttatgtaccttgaaaactacatatagtaaaaatcaatagatttagataaatatctaatcaagacatccgaggtaatgttaacaacattaacttacagtctgaagaaaacagacttaaaataaattgactatcaccaacgcatacaacgctatgtatgtgtggacgttatcccattcccgtgggatgaggtcgagttggttatgctgataagagcgtatggtggatgccttggcactaagagccgatgaaagacgtgataagctgcgaaaagcttcggggaggagcaaatatcctttgatccggagatttctgaatggggaaacctacttgagcaaacctcaagtatccttaagccaatacataacttaaggaagggaacccggtgaactgaaacatctaagtagccggaggaagagaaaacaacatgtgattctgtgagtagcggcgagcgaaaacggaagagcccaaaccagcgtgcgtgcatgctggggttcggaccgcggaattgattcaacaagtttagcagaacggttttgggaaagccggccagagagggtgaaagccccgtaagcgaaagacgagttgacatggcgggatccagagtaccacgagacacgtggaaccttgtgggaagatgcggggaccaccccgtaaggctaaatactacttagtgaccgatagcgcatagtactgtgaaggaaaggtgaaaaggaccccgggaggggagtgaaaaagaacctgaaaccatatgtttacaagctgtggaagagctttatatgctcaaccgcgtactttttgtagaacggtccggcgagttacgctggctggcgaggttaaggactaaaggtctggagccgaagggaaaccaagtctgaatagggcgcatagtcagtcggagtagacccgaaaccgggtgatctatccatgtccaggttgaagttgccgtaaaaggcaatggaggaccgaacccacatccgttgaaaagggtggggatgaggtgtggataggggagaaattccaatcgaacccggagatagctggttctcctcgaaatagctttagggctagcctcatacgagtcttgcggaggtagagcactgaattcctaagggggcgtcaaagcttactaagggatatcaaactccgaatgccgtgtagatgatgtatgggagtcagacgatccgagataagttgggtggtcaaaagggaaagagcccagaccaacagctaaggccccaaaatgtgtgttaagtggaaaaggatgtgggatttcgaagacaactaggatgttggctcagaagcagccattcattcaaagagtgcgtaatagctcactagtcgagaggtcctgcgccgaaaatgtccggggctaaaacacactgccgaagctttggaattgagaattcaattggtagaggagcattcttaaagggacgaagcagtaccgtaaggagctgtggacttttaagaagagagaatgccggaatgagtagcgagaggaaggtgggaatccttccggccgaatatctaaggtttccagagtaaagctgatctgctctgggtaagtcggggcctaaggcgaggtcgaaagacgtagtcgatggataacaggttgaaattcctgtactatcctgtaacagaactgtggggacacaggcagagagcgtgagccgggaatggaaagaccggtacaagcgaggtaggagaagagttggcaaatccgctcttcaatctgaagacgtgatgtggactgaaaataagtagggaagcacgtgagctgactgtcaagaaaagccgctattgtttgcaggatacccgtaccgtaaaccgacacaggtggatgaggagagaatcctaaggccgacgggagaagcattgttaaggaactcggcaaaatgactccgtaacttcgggagaaggagtgccagtaagatggccgcagagaattggcccaagcaactgtttagcaaaaacacaggtctatgcaaaaccgaaaggtgaggtatatgggctgacgcctgcccggtgctggaaggttaaggggagaggttagcgcaagcgaagctttgaacttaagccccagtaaacggcggccgtaactataacggtcctaaggtagcgaaattccttgtcgggtaagttccgacccgcacgaaaggcgtaatgatttgggcactgtctcaacaatgcacccggtgaaattgaaataccagtgaagatgctggttacctgcgccaggacggaaagaccccatggagctttactccagcttgatactgggattcggtattgcatgtacaggataggtgggaggctaggaaatggtaacgccagttgccatggagccaatgttgggataccacccttgcagtactgggtttctaaccagcagccgtgatccggctgggggacaatgtcaggtggggagtttgactggggcggtcgcctccgaaagggtatcggaggcgctcaaaggttccctcagaatggttggaaaccattcgaagagtgcaaaggcagaagggagcttgactgcgacaccgacgggtggagcaggtacgaaagtaggacttagtgatccggtggtataaagtgggattgccatcgctcaacggataaaagctaccctggggataacaggcttatcactcccaagagttcacatcgacggagtggtttggcacctcgatgtcggctcatcgcatcctggggctgaagtaggtcccaagggttgggctgttcgcccattaaagcggtacgcgagctgggttcagaacgtcgtgagacagttcggtccctatccggcgtgggcgtaagatatttgagaggagctgtccttagtacgagaggaccgggatggactggccgctggtgtatctgttgtcttaccaaaggcatagcagagtagccaagccgggaagggataaacgctgaaggcatctaagcgtgaagcccccctcaagatgagatatctcataacgtcaagttagtaagaccccttgaagacgacgaggtagatagggcagaggtggaagtgtggtaacacatggagctgactgttactaataggtcgagggcataaccaaagcagtgataggtttggatgatgatgttggttttgactgtatgtagttttgaaggtacatggaatatagacaggaatgagaagcagtgcgaaagcgctgttttttttgttaaacaatttgagtttataatgaaaaatgaaaagaaataacgtaatatagaggtagtagaataagaaaaaaggagtgtgtcaaaatggcaagaatcgatcacgcagcaatccgcacgaaatcatatgaagaagcacaacatttttttgaagatgtatttgagatgcatatgtggagagaaatcggtgaaaaaccgggaagaaaatgctggtacaaagaaggtatccagctttgcgaagtagaggagctgaatgcagcatcagaaaatggatatgatcacatttccattgcagtagattcagaggcagagattatggagaaaatcaaagcgtatccggtaaaagcaatcaatgaccattggttttcgcttccaaacggaacaaagattgagttaaaaccgctggcagagtggaaagtagatgcataaaacctcacaaggagattatgaagtatgagattaagaaatattttgattgttgtagaagatatcgagaaatcgaagaaattttatcatgatttatttggacttgatgtaatacttgataatgaaggaaatgtcattctgacagagggacttgttcttcaggagaaaacaatttggaagaactttctggaaagagatatcatttcagagagcaattcctgtgagctatattttgaggagaagaatatcgaagcctttgtcgaaaaactggacaaactttatccagatataaagtttgtgaatcgtttgatgacgcatagctggggacagaagattgttcgtttttatgatttggatgggaatttgatagaggttggaacaccaatgtaaaaaacctgcttaatagtactagtaaaaagaaagaaatcgacaggatgaaaatgataagctcatttagaaaacatcctgtcggtttcttttgtttacgcgagcaacgagccaaagtccgtacttgtacgagaccttggagaatgctgcgataactatctgatcatccctagaaatgcttcatgaatccgtgtgtcctgatctaattccggatgaaatgcaaatgccatctgattcttatatttcactccgacaatacgattctctacaatactgaggatttcaggtgtgtttccggaagcgtcagcatgaacggattctacaaaaggggcacggatgaaagtcataggaatttcaccgataccggctgcttcagcatttgtatggaagcttccaagctggcgaccgtaggcgtttcgtttgactgtcatagggatggtttcaaaataggtttcgtcttgttcagcaatgtcagaagccaggagaatcattccggcacaagtagccagaacgggaataccggatttaatcttctcttttaaaggttcgaacatgttaagatcgtgtaagagttttccctgaacggtgctttcgccgccgggaaggataatcccatcaaaatctttttgcagatcagaatcctgtcggagttcaatggtatgaactccaagcttttgaagcatttgttcgtgttctatgaatgctccttgaagggcaagtactgcgattgtcatcttattttcctctttctgccatgagaagttcaatttcctgttcgttgatgccgaccatagcttcaccaaggtcagatgaaagttcagcgatcagttttgcatctgtatagtttgtaacggcctgtacgatagcagcagcacgtttcgccggatttccggatttgaagataccggaaccgacaaagactccctctgcgcctaactgcatcataagagcagcatcagcaggagttgcaacaccgccggcagcaaagtttacaacaggaagttttccgttttcatgtacgtaaaggacaagatcataaggaacctgcaactgtttggctgcctcgaaaagttcatcttcacgcatacttacaagtttggaaatttcactgttcattttgcgcatatggcgaactgcctgaacaatatcaccggttcccggttcaccttttgtacggatcatagaagctccttcattgatacgtctgagtgcttcgccaagatcttttgcaccgcagacaaatggaacaccaaactctcttttgttaatatggtagacatcatctgcaggtgaaaggacttcgctttcatcaatatagtcgatttcaattgcctgaagtacctgagcttctgcaaaatgtccgattctgcatttggccataacagggattgaaacagcttcctggattcctttgatcatcttcgggtcactcatacgggaaactccaccagcagcgcggatgtcagccggaattctttccagcgccataacagcacatgcaccggcagcttctgcaatctttgcctgttccggagttgtaacatccatgatcactccaccttttaacatttgtgccagatttttattcaattcataacgttcattatttgtactcatttttaaatctccttttctttactaattcgataggtaatagtataatgacaaagtgactatataaaaatactcagttttaatatattcaaaaaggtcagagtggagaaaaaagtaaatatgttgacgtataattttgaaaatatagggtcagatacgctctatgaatatttgtataaatgtatcaagaatgacattattcaagggaaaattaagagtggagaaaaacttccatcaaagcgtgcacttgcaaaaaatctggctataagtgtaattacagtagaaaatgcttatgggcagcttgcagcagagggatatatttattccgttccaaagagtgggttttatgtagcagacctgcgggatgacagaatgaaaagcgagagtggtttatcagaaaataggatttacagcaataagttaaaccttaccggtggaaagaatgcttatatcgcagattttacgagtaatcagacggaacagagtgcatttccattttccatatggacaaagacgatgcgggcagtaatgaatgactatcagacagaattgatgcttaatccaccgtgtggtggagtaatggaattaagacaaagcattgcggattatctgaaagcattccgaaatatgacggttcggccggaacagatcattattggtgctggaacagaatatttgtccagtcttttgattcagcttttgggaaagaaattgaaatattcagttgaaaatccgggatatcataaaatcgcaaaaatttatcgcagtatgggagcttgttatgagtatatagaaatagaagaggacggaccgaaggtagaagaactggaagaaaaagaaatcaatgtgatacattgttctccgtcacatcattatccaacgggaatcgtaatgccaatcagtaaacgttatgagttacttggctgggtgacaaaaacgaaagatagatatattatagaagatgaatatgacagtgaacttagattgaacggtaagccaattccatcgcttcagagcattgatgtatcgggaaaagtgatttatatgaatacattttccaagactttgtgttcaacagtgcgaatcagttatatggtgctaccggatgaattggcagaacgattttacagagaactttctttttattcctgtacggtatcaaattttgaacaatatacgttagcgcagtttatgaattcaggggcatttgagaaacatattaaccggctgcgtaattattatcagcagaagagagaccggatcctggaagcatttttacagggagtattgaaaactaaaatcaagattctggaagaagatgcaggagtacattttttaatgaaagtagatacaaacctgagtgaagaagaatttttggataaaatgaagagcaaaggaattaagctggctgcattgtcatcctattatcattcaagtgagaagaagaaaaagtatgaaaatatttatgttatgaattattcatttgttgattgtgaaaaaatggaatatgttgcaaagatgataacacaagtggaatgacatggagaaaagtatggagggagaaagataaaatgactttgcgaaagaagttaatgctctcttttttgatactggtgcttttgatgggatcaatgattggatatttttcttatcaaaatgcaaaaaatcttgtattggaaaacaaagaacaagagatggctgatacaattaacagaattgatatctctattaatagtcaggttcagcagatcaatcgtctggctgaaaatgtaaaatccagtcaaatcgtgagggcatatttgaaaaaagagatacatacgcaggaagaaacagaagaattaaatgattggatggaagggcttttaaatcttatatcaagctgctcagatttgatactgatgaatgaagatggaaccgtgtattacagctattcaggctgtcaggcagtgaatgataaaaggcggatggaagtatatgagaatgcagcaagtaaccttgttggagatggtacctggacggaaaaaggaagttcgctttgtcagaaaaatgcagaagaagtagtaacatttataagttctatcaataaggtaattcttgcgatagaattgaatccggagacgtttggacttttgatgttaaataattatagtacctttcaaaatcagtacacttatctggtggattgcgccggaaatgttctgtgctcgaataagacaaatatttatgattggggagatgtcgtaacaaaagggatggaaaaaagagttagaagatatgaattcaactgggataataaggattattttgcctgtaggcagtataatggactgaccggatgggagacttattcagtggtttcgacagatgatttctttccacaggcaaagagacttcgagaagcaattatgggtcttgttttgctggcaatgctggcggcaggagttggaatttttattttgtcctatacatttacaaggccaatcgggagattgaaaaatgctatgaaacaggtcgaagcaggagattttgaaatacaggtagaatcaaaaacacaagatgaaataggaatactgattcagtcttttaattatatggtcagtagattacgccaattgattatggaagtataccaacaaaaactggcacagaagaatgcagagcttacagcacttcaggctcagatcaatccacatttcctttacaatacattagattctatcaattggatgttaattgaaaagggagaatgggagataagtgatgttgtagtatctttaggagatattttaaaatattcacttcatggagaagagatgcttgtactttttgaagaagaattaaaatatattgaaagttatctttgtattcagaagaaccgattagaagatcgtctgacagttcagatagaaatagatgaagaagcaaagctgtgttttgttccgaagctgattcttcagccgattgtggagaatgcgattctgcatggaattgagaagaagaaggggatgggcagaatccagattcaagcgatcgtcagagaaggaactcttgagatacgtgtaacagatgatggaatcggtatgcagccagatcgtttgatgaggtttagggagagtattatgtcagatgaaatcagtggaaagcatattggaatgcgaaatgtacatcgtagaatccagctgcattttggagaggcatatggattaaaaattgacagtgaatggcagaaagggacaaccgttactattcttctcccggtagaagaagtggatcaggcaaaggaggttacaggagatgaaaatcgtaattgtagatgatgaaccgaagatcaggaatggtctatcaaaattattgtcatccagacctggatttgagattataggtgtatttgaaaatgccatggaagcgctggaacaattgtctgtttcttatgtggatgtgattattactgatattaagatgccggagattaatggcctggatctgatcaatcgaatccgtgaaaaggatgagaatacaaaaattattatattaagtggttatagtgatttttcttttgcacagagagcaatagagcttggtgtgaccagatatctgacaaagcctacaaatgccagagaattgattggaattctggaagaaattgagaaaaatattcagaaacctcggagtgaagaaaaacaagaaatgaaagtgacaaatctttttgttcagaaagcgatggactacatttctatgaattattcacaaaagctgaccttgacaaagatttcagaacaactttgtatcacgcccaactatttgagtgagttgtttaaaaaacatacaggtcagaatgtatctgaatatattatagattaccggctggagaaagcttgtcaatttcttaagaatccgcagcttagaataggagaagtttcagaaaaagtgggaattaacgatgttcgttatttcagcagtatgtttaagaaaaaatataatcttacgccgacagaatacagaaacaaacaataaaagagaaaaaccgtaaatattaaacaaaagtagaaggttatcacattgaaaaagcaacaaaatgtactaaaattgaagtataagatatcaatgcgcaaatgatatatcgaaacaaaaaagaaaaacaatggaggtacactatgggggcttttcaaagacagataggcgatatggtagaattgacaccggaaggtgaaaaggaaatccataaatacaaaaacaattatgcggatgcgacaaaaccattgagttcaaaagagcgtaactggtcagcatgggacatgggaaatctgtggattggtatgattgtatctatcgcagtataccaggtagcaagtggactgattgtatctggtatgtcatgggcacaggcattgttaacgattgtattaggacatacacttgtcatgatttttgcagttgttcttggacatttcggtacaaagtatggacttggttatccgatgctcagtaaaatggtgtttgggtcaaaaggaactgtagtcccgtcaattgttcgtggagtacttggttgtttctggttcggtgttcaggcatggattggcggtcaggcacttaatgcaattatcggagcaatcattccggcatggcatggacttggatttaaaggtttatttatttcgttcttattattctgggcaatgaatgtatatattgcaggatcaggatccagtgcattacagaaactggaaaagtttgcagcaccggtattgattgtgttgagctttatcgtaatcatctggggaattagaagtgcagattggagtgtgtcgaaacttctttctgacccatctcttcagggagatccgtccaagaatttctggacactgtttttcccggcattgtcttcaatgattgcatttgacggtggtattgcactgtctatggcagatttcacaaagaactgtaaaacacagaaggcacaggcagtaggacagcttgtcggggcacctgtaatgacagcattcatttcctttgtaggaatttgcggaacagcaggagcagcaattgtatttaaagaagcaatctgggagccggcagttcttgtaagtaaatttgacaatccgattattgtaattattttctcattgttcattattatggcagtactgacaacaaatgttgcagcaaatctggttccaccgacaaatgttatcgcaactttatttgcaaagaaagtaagctacaaaaaggctgctttgattgcagcagtacttgctttatttgctcaaccgtggaatgcactggcaagtgcgtacgatttgatttataatgtatgtggaatgcttggagcgttgctgggacctatctcaggattatatctggtatcctatctgtttgagcataagacagaggttgatatggttgatatgtacaaggaagacggcggaaaatattattattcaaaaggctttaatgtaccgatcatcattatttttgtggcagcaatgatcattatctttgccggaaaatatattgcaccactgaaatttatctttgacaatgcatatgtagtaggaagtatcggtgcaggtcttgcatactttatctatattaaagcagcaaaaagaggttagaaacagcactcatcaggcacaaaaatcaccacaactatggaaagcatagactgcggtagaagtataactgaaactaagagaggagtggaagtatcatgaaaacacttgtaaaaaatggaatgatcgtatcaccggaggacacttatgaagcagatgtcctgattgaggatggtgtgatcgaatgtatcggaaaaaacctggaagcaaaatttggggatgcagataaggtgatcgatgcgaaaggaaaatatgttctcccgggaggtattgatgttcatacgcatatggatattgatgtcggaatcgcgagagcagtagatgatttttatacaggtactgttgcagccgcatgcggcggaactacaacaatcgtagaccatatgggattcggaccggcaggatgcccactacatcatcaactggatgtatatcatggactggcggatgataaagctgttatcgattatggattccatggagtagttcagcatgtagacgagtctattttaaatgaacttgagacaatgatggatgacggagtccagagcacaaaggtttatatgacttatggctataagattgatgatgatggtattttagaagttcttaagaagatgaaagaactgcatggaatcacagcattccattgcgagaatcattatgtggtagagtatctgaagaaagaatatggtgatgccggaaagacagcgccgatctatcatgcaaagagcagaccgaatcttgcagaagcagaggctgtaagaagagtcctttatcttgcgaagcttgcaggtgatgcaccggtgtatattgtacatctttcttgtaaggaaagtcttgaagcagttgaagaagcaagaagaaacggacaaaaaaacatttttgttgagacatgtacacagtatctgacacttacagaagacagatataaagatccggatggattgaaatatattatgtctccaccgcttcgtacacagcaggatcttgatgcgctgtggaaaggattagaggcaggagagattcagatcgttgcgacagatcattgtccattcaattatgcaaaagagaaacaggacggcaaggatgatttcagaaaatgtccgaatggagctccgggagttgaagaaagaatgattcttcttttctcagaaggtgtaatgaaaaacaaaatcagcatcaacaagctggtagaagttgcctgtacaaatccggcaaaggtgtacggaatgtatcctaagaagggaattattgaaccgggagcagatggagaccttgtgattattgatgctgatgcaaaacagacattgactcacaagatgatgcacggagctgttgattatacttcttatgaaggaacagatctgcacggaaagattgatctcgtaatgcagagaggaaatatcatcgctgaaaataatgaatttaaaggtaatcgaggagatggaaagtatctctatagaaaaccttttttaggagatttataatcgaaagtcagaggatctgaaatatacagaactcaaaaataaaggataacaaggcatggaagataccaggaaaaaaaagaaaataaaagctgagacaggcatcattgttgcagtattacttatcattgttgcagtaatcgaaggaactacttaccgaaaaattattccggccaatcagccgaaagttgttgtaattcttccgggagatacaaatgatcaaagttggaatacgggaaattacgaagggattcttgcaaatcagaacaaagataagaaaattgatctggagtatcagagtaatgtcgaagagaaagactttgaggcagtgattcgtagatatgcagaagataattataatctgatcatacttgcaggatcacagttcgaggaggttgtttcttctgtgtcaggagattatccgaaagttgatttttgtattttaaatggccgatcggcatcaggtaaaaatacattttctgtttatccaaaagaagaggaggcaagccatctggcgggaatcattggtggaaatctgacgaagacaggaatacttggcatcattgccggttatccgaatgaggcaatggagaccttgctggatcagtatgaaaaggatgttcgtcagctggctgcggatagaaagcttccgaatgcaacagtactcagggcctatgcgaatagttgggaagatgaggaacttggaaaagagattgcaaaccaaatgatcggaaaaggtgcagatgttttatttatttacgcaaataaagttggaaatggctgcattgaggctgcaaaggaaaatggagtaaaggtgattggattttcggagaatcaaaatgatcttgctccgggaacggttgcagcatcgattaagtttgatttcggaaaaatatattcctggattttggatcattatatggatggaaaactcaatggtaatgaagtttatggagtaggtatcgaagaagaaatttttattccgatttttacagatgaagtatcgaaggaagtacagcagacggtagaaaataatatgaaataataagagaacccctaaaacagaaccgttcacggtaatgttttagggggctttttgtagttatatattttagaccattacattagatcagatgtgtactttcaagcttctccataaatgcatcgttcatctttatgattggttttctgagcagaagaccaagcagcagtgacggtgcaaggaagattgccagtttgctgagctctgtagcataagttgttccgtagaatcctgcaatacattcacgcatcgcattcatgctgtgtgtgaacggcagaagtggataaacaacctggaaaaacttcggtgcacactggatcgggaatgttccaccacttcctgcaacctgcattaccatcaggacaacggcaattgctttaccgatatctccaaaggagacagtcagtgcatagatcagattcacatagacaaagcttgtgaacataccggttagtataaacattaccggatgcttacactgaataccaaggaagaaaagatctccaagacagatgagtgcactttgcatgaaaccgataatgatcagaagtaggatacgtccgatatagagctgatattctttcggatggaatagtttcttctttgtagaatcagctacagtgacttttagcatggcagccataacaacagcacctacccagatcgcaagagtggagtagaatggagtcattgcagacccgtaattttcaattggataaatctttttctcatccagtttgaccggagaggagaggaaagaggcgattgtctccggatcttctgataacaggtttgtcacagcggaaagatccttcgaatcctcggaggaaagcgttgcagccagtgaagttaattttccggaggcctcattcaacagttcagcggaattcgaaagagtcttctgaagtcctgtcagtccgtcggaagtagaacctgtgacaccagcaatgttctgaatgctcttatcaagatctccaagcatggaagaaatggagcctgttgtggaatccagattggcagaaaggctgtccagatttccttttacattattctcatatgttgtcttaacttctgtgacagatgatgttgcctgagtgatcagggtgtcaagttcgctttttaattcagcagcatttgcagtagctgtaggaagtgcttcggcagcagcatttattttatcgcggattgctgtctgacgatcaattgccagctgtatcttctggttaatgctggcaacagcatcatttaaaatcgtgagctcggggtgttcatttgcaatcgctgtcagagcatcagacagcttcgtatattcatcaattacagtttgtacacgactgctgacagaagtcagggcatttgacgcagcctgggcatcgctattataggagtctaatgctttgtcaacagcatcagaaacagcggtgtaaaagctggcgttttgtgtcagagcatcagaaattgtctttgatgtaccggatactaaagatgtcagggaacttaaatctgaattttccagggagctgacgctggactttgtaccagaaccgctttcctgaaggaattccgttgttgtgtttaacattgtgatggctgaatcagtcatatcggataaagactgaacggttccggcaacagaaccaagatcggttcccatctgatttaagttatcaatcaaatgatcaaccatagagtcatccccggcttcctgtgcagcagaacttacaatctgaaaagcatccagtgcagtctgtgcgactgtttcaataaacgtttcgttaatttgcttttggacagcagttgctccttttcctgtaatgattggagcaattgcattttctttttcattttgataataagtcagatccgggtgttctgtatttgatgagaaaacactcatcattttctgactgaaatctttcggaatgacgatcgctgcataatatttcccggatttcacacccttctgtgcagttttagaatcagtgaaaacccagttaaattgtttatttttatgtagagaagaaagaatctgatcccccatgttgatttttacagcgataagttctccggtgtatccttcatcatcacttgcgacggcaagtttcagttcgcctgtgttaccgtatggatcccagctcgctgagatgttaaaccatgcatagagagtcggaattacagtgattcccatgataacgatcatagcgataacatttttgtgaatcttcatcacatcatttttaaagattaagaaaatatttttcaaattattccgcctcctttccacggaagttttcaagcatctcttcataggacataccggccatttctttttgttcctccagttttgtatggatatattctataacaatcagccatacagagattgcgataatagagataatccacaaagtcaggaacacgatctttgattcgagactgaacatcagaatcaggaagatcagagggatgatcgcaatggcaaggaagccgatacgaaccatcttccggtaattgttttcaaatttctgtgcccgttcagctgttacgaggcgaaggtcttcgatggaaagagatgcctgtaagagcatggaaagctgtgtacttctgctaagttctgcttcgtgtggttcgcacatcataaattctgtttctgccagtttcttgtcgaacagatggttcagtccggaaagagcagggcgtagtccaagtccgataagcagagagatcggtacatagcacagaagcaggatcagaagatcgttgcggaagttggaaccgtagaaaccggcaattgcttcacgcatagcattcacaccataggtaaatggaagaagtggatgcagtttctggaaaaatgccggtgtcatctcaatcgggtaggttccggaagaaccaggaatctgcaggattacgagaataacacagagcgctttaccaatatgcttaaatgtaagtgacagcgcataaataatatttacataaacaaaggaacaaaccattcctgtcaggataaattgtgatggatgattacattgaactcccggaaggagtgtatcaccaaggcagacaatgaatccctgaataagaccaacaaccatatataagagccagcggccaaaatataatgttgtcggtccatagccatgcatggagctgtctttatctacttccatcttgaagattgcgatcagtacgataccaccgacccagattgcaaggttggagtagaaaggtgtcatcgaagaaccgtaattatcgacagcatagtatgtctctgtattgatctctacaggagaagacatgaaggaagcaattgaatctgcatcaatgccttctaaagagagcagtttctgataagtagccgaacttgtgatggcattgagatctgtctgaagtgtgtttaatttattctcaacagcgcctaatgcatcttttgttctgttcagtaattcagttgtatttgataatcctgtagtcagctgatcaagcatgctgttcatctgatcagaagtggcaggaacaccgttaagcattccggttacctgaccggtcagagaggaaaaggtatccaacgtctggttgagcagtggcaggatattctgatccagagaagagcggaatgtatgtagattatctatattttcttttgtaagagcagcaagctgttcctgggttgctgtagttgtatccaatgcatcctgtattccgtcatttcctgtctgcaggctgctgatcaattcattattccgctggttctgtgcctgaagtgtggaaatctttgcagtgatctgatcaccaattgttccaggaagctggcctgcgagatcttgcatgtctgcaagaatgtctgcatttaattcgttgacctgattggcataaccaagagcggtactgacagaagtatttatcctgccggcagcagtcgcaagatcagttattccggaagatgcggagctgttagctttcccaagcagcagttctccgtcggaaagtgcctgagagagtgaagaagaaaattctcctgcggaggatcttgttgtctgcatgatcttgtctgcatcagacagtgcatttgcaccggaagaggcagcagttccgagtgaatcggctgcatttttcgcattctgtatcagcgcatttgtatcagctgaaccagcttgaaactgatccagaagctgagcatattcctgaatattgttctcagctttggcaagcaggctgttgatatcctcagttgtggaatcaacaaagtcagaaatattgaatacagattctttcaaaagttctgcaattgtttcagatgcaacagaggaaaaagtattgtttatttgtgtctggatcgtgcttgcacctgaactggtgatctttggcgcaattgcattgagtttttcattgatatagtattcaagttccggagtttcaatctttccggacaggacacttagcagggattcgctaaaatcttgcggaataatgattgctgcataatattcaccggatttaactccttcaatagcagcatctttggaaacaaatgtccatcctaattggtcgttttcttttagttggtcaataatctggctgccggcattgatcgtcagatcatcatgtgtggcatcggtgtccagatttgctactgctaccttgatgccggaagtattggcataaggatcgatatttgctgcaatattaaaccatgcgtagagtgaggggagaatagatactccgatcaaaacaagtattgctgccggattacggagcaggcgtttcatatcgcggcgaaaaatccgaaatgcgtttctcatggataaaactccttttcttaaaaatatttctagtaatagatacaatgttgattttcatgtcaaaaagtattatattaatgtagaaactaatttacaaccattaatcaacactggatatgtctaataatagacgaaagattgaaaaatgtctagcaggtggagaaaatcatgttactgttcacacgatatgcgaccagcaacgcatctcgccattttaaatcgcctttggcgatggggcgagatgcattcaagccaaaacatgcatcctccgtgtcaatcagcgaagtgattgacatgggagtgaacagtaacaaaatcattcatttaagtcatagaaacagagtagagagttattggtcagtagtactgtaagttataaaggggggaagagaagatgcagaagaagacagatcgcagagtcagaaagacaaaaagtcagcttaaaacaggcctcgctcaattgatgagggagaagagtatcagagagattacggtaaaagaattggtagatgcggtggatatcaatcgttctaccttttatctgcattattctgatataccggggctgcttgcagaagttgaaaatgaaatgatggaagagatgcagcgcgcaatccgtgaacatccaattgatccgggaaaagataccgtttactattttattcaggatttatttcatgtgcttgatgaaaatcgtcagattgcaagtgcgcttgtaggaccacatggggatattggttttgtacataagttagagcagcttttagaggaaaagagccgggagtcacttgcagctcttgtaccggagaaaacaggtgaaatgaaatatttttattcttattgcctgaacggttgtctcggttttgtgaaaacatggttggaaacaggcgaaaaggaaacaccggaatatgcagcagagatggcttatcgaatggttgtaagttcagttacagcattttatgacactaaagaaggaagagaggacaactaagaaatgaaacgagagaaatttggctcacgtctgggatttatcctgatctcagcgggatgtgccattggcttgggaaatgtttggcgttttccgtatattacaggaaagtatggaggagcagcatttgttctgatctatctgctgtttcttgttctgttgggattgccaatcatggtaatggaattcgcagtgggtcgtggaagtcaggcaagtattgcactatcctttgaccgtctggaaccactgggaacaaagtggcactggtataaatggtttggaatcggaggaaactatcttttaatgatgttctacacaacaatcggcggatggcttcttctatatacaggaaagatggcaatcggagagtttaaaggacttgatgcggatggtgtgaccggagtatttacatcacttcttggacagcctgttacaatgacaatctgtatgatccttgttgttgtgctgtgctttggaatcgtctgtatgggacttcagaaaggtgtggagcagatcacaaagaaaatgatgatcctccttttcgtgttgatgatcattcttgcagtgcgttccgtgacattgccgggagcagagaaaggactggagttctatcttcttcctgattttaagaaagcagcagaagcaggattgaaagaagttattttcgcagcgatgggacaggcattctttacattaagtcttggaatcggtgcgattgcgatctttggaagttatatcggaaaagaaagaactctgacaggagaagcagtctgtgtaacagttctggatacattagttgcattgatcgctggatttattatttttccggcctgctttgcatttaatgtccagccggacagcggtccgagtctgatctttatcacacttccgaacattttcaatgcaatgagtgcagggagaatctggggaacaattttcttcctttgtatgtttttcgcagcatgctctacgatcattgccgtgtttgaaaatctgatcgcatttgtgatggatttaacgaattgttcaagaacaaaggcggttgtgggaaatctgatcgcgattattgtactttcccttccatgtatttttggattcaacatatggagcggcttcatgcctctgggagcaggaagcagtattcaggaccttgaggactttattgtaagtaataacctgcttccgatcggaagcctgatctaccttctgttctgtacaagccgctatggttggggctgggataagttccagaaagaagcgaatgcaggaagtggaatcaagttcccgggttgggcaagattctatgtatcctatattctgccattgatcgtattatttatctttgtgcagggatattggagtaaatttgttggataaaacaataacaatattgtgaaataaaaaacgctataataaccagaaattcattgccattctattagtgataagttataatttaactaatggttttgcaagagatttacaactgttccaaacggaaagaatacgtttcaatctgaatgcaacagagagatatctcatagcaataaagacatggattttgaatagaatatagactctgacggcaaggaagtaagagataccgagcgggaatagttgtaaagaagcatttagacaaaaaaatattttgtgattttaacagactctttttccgttggggagaagggtctttctctttaccagggaaataaaatgggaggatcagcaatatgttaaaggtagcaatttacggaaaaggtgggattggaaagtccacgattacatcgaatctggcagcagcatttgccgctatggggaagcgcgtaattcagatcggatgtgatccgaaagcagattcaacgatcaatctgttaggcggcgagccattgcgtccggtaatgaattatatgagagaagaggatgaggagccggaagaattagaacagatcgcaaaggaaggcttcggtggtgtgctctgtatcgagacaggcggaccgacaccgggactaggatgtgcaggacgcgggatcatagcgacatttcagttattagaagacttgcggttgtttgagacatacaaaccggatgttgttctgtatgatgtacttggggatgttgtctgtggcggattcgcagcaccgatccgggaaggatatgcagagaaggttgtaattgttacatccggagaaaagatggcattgtatgcggctaacaatatttccagcgcagtgcgtaattttgaagatcgcagttatgcaagaatttttggattgatcctgaatcatagaaatgtggaaaatgaaacggagaaggtacaggcatttgcagaagaaaaaaagattcctattgttggtgagattccaagaagtgatgagattatacgctgggaagatcagggaaagactgtgatcgaaggcgacgcagattctgagatcagtaagagattctttgaactggcagaaaagctgttagaggatgaaacagaacgtgtgagataaaatataagtcgagggaaaatatatgaagaaagcatatttttgtacagcggaagaactggaacaaagaggaaaggataatcttccgaaacagtttcagtcaggggaacatttaatctatagttcgccggctacgcttgcctttaactctccaggggcagaagggttcggagtgaaaagagcaggacttgcagtgccgggatcgatcatgctgatcgtggcaccggggtgctgtggaagaaatacgtccatgatcagttcaatgaaagaatataataaccgtttcttttacctttgcatggatgagactgatattgtaacagggcgtcatctaaagaaaatcccgaaagcagttgcatcaatctgtgaaagtcttgagaagaaaccatccgttgtgatgatctgtattacctgtgtggatgcccttcttggaacagatatggaacgtgtctgtagaaaagcggaagaaaaagccggacttccggtgcgtccatgttatatgtatgcattgacacgagagggacgaaagccaccaatggttcatgtgagacagtctctgtattcacttcttgaaccaggacataaaaaaggaaatgtagtaaatctgctcggatacttttcaccactcgtagctgactgtgaattatatacactgcttcaagaggcaggtgtgaaaacgattcatgagatttcgagatgtgaagattttgaagaatataagaaaatgtctgaggcaaattttaatcttgttcttcacccggaggcacgatttgcagcagaggattttcatgatagattaaagattccatttatcgaactgcgcagactttatcagattgataaaattggaagccagtatcaggcatttggcgcagcacttggaatagaatttcatgcagaggaacagaaaaaacaggcacaggaagcaattgaaagttttcgtaaagtctgtccggacccggtatttgctattggggaatgtgcaaatgcggatccgtttgaattatcattagcattggtgaaatatggatttaaagtagcagaaatctacggaacgattactggggagaactttatttatatcagacagttgaaaaagttaagtccgcagacaaagattttttccaatatggaaccgacgatgctctattatgatccaacggaaagtggcgtgacactgacaatcggaaaggatgcctgttattatcatccgaacacaaaaggaatccattggaatgaggagagacagcctttcggatatgcaggcgtgagaagactgtttgaggcgcttgaactggctgtgacagaacaggcagaaggtaatgttttgcagaaacaggtggaagtgatcggttctaaatcacaagaagcaattgcagagcagagtcaagaagcactgttcaaagaggaagtggacaaaaaagaagacgttcatgtacgtggcctttggaaaggactgactccatttgcgccggatcagtcaggtgcagcgtccgttttctatgaactgggaggaattcttgttatttgtgatgcgggaggctgtacaggaaatgtatgcggattcgatgaaccgcgctggttcggggaacgtagtgcgattttcagtgcgggcttgcgtgacatggatgcaatccttggaagagatgacaggcttgttgcgaaacttacggatgcagcagagaagattgatgcaaattttgcagcggtgatcggtactccggttccggctgtgatcgcaacggattatagagcattacagagaatgtgcgagaaaaagacaaatcttccgattctgactgtagatacgaacggaatggaactgtatgatgtgggagaagagaaggcatggctgactttattcaagacatttgcaggaaaagatgtagcatcacagaaggaagcttcagaagaagacgattcttctaaaaagatgaaaatcggagttctcggtctgacgccacatgatgtcagtgacctgaatatagaagagaagttccggaaatcagaaaatgagaatacgcattatatttgctatggaatgagagcaggtattgataaagtaaagacagcaggttcagcagataagaatctggttgtagcaccggcggcactcgagacagcaaaatatctggaaaaagaatttggcacaccgtatgaagtgggatatccattcgtagatgaattgatacctgaacttggttatgaaaggaaaaagatactgatcattcatcagcaggtgattgcaaatgccatcagacaggaaattcgtacaagaagtgatgaacagaatacagaagttacggtggcaagctggtttatgatgaaatcagagatttcagaagaaggagatctttcactgaaagaagagaaggattattgtaagcttgttcaaaatgggaactatgacattgtctttgcagatgaaaatatgagaggcctggtaccgggattcaaaggaacatttgttaatatacggcattttgcagtctcaggaaaactgcaggagtcataacgggaggaaaaagtctatggagaaggagataacgaagaaaatccgtgtctatggaattgtacagggcgtaggattccgtccgaccgtcagtcgacatgcagattcctgtaagatcagaggaagtgtcagtaaccgtggaccttatgtggaaatttttgcacagggaagcgagacggcagtgaatctgtttattgagaaagttcgtacctgtccgccaaaacgtgcagcaattcttaaggtttcagaagaaatactggatacaaaggaaaaatatccggacttttctatcatagaaagcgagaagacaaaaggagagatctttatttctccggatattgcaatctgtgaggaatgtaaggaagaattgtataatcccaaggatcgcagatacttacatccgtttattaattgtacgtgttgtggtccgcggcttacgattctggatgctcttccatatgacagagagcgtacgagtatgaaagaatttccgatgtgtccggaatgtgaggcagaatattacaatccggaaagcagaagatacgatgcgcagccggtttgttgtaatatgtgcggaccggaagtttatttgatcaaaacttctgatagaacgatagacatgaaaggttctgatgcaattacggaagcaagaagagtgatttccgaaggcggaatcgtagcagtgaagggaatcggaggatttcatctttgctgcgatgcatcaaatgaggcagcagtggaactgttaagaaagagaaaacgccgcccggcgaaaccgtttgcagtgatggcaagaaatcttgaggtagtgcaaagtgtctgtgagttgagtaaggagcaggaagaaattctcactggacatcagaagccgattcttcttttggtgaggaaagagatagaaacgaagcagctgtgttcatctgtcgcaccaggcaatccaaaagtaggagtgatgcttccatatgcgccggtgcagttacttctatttcaatatccggatggaatcaagatgccgaactttctcgtaatgaccagtggaaatgtatccggtgcgccaatttgcagatcggatgaggaagcactcgaagagctttcggaattttgtgactgcatcttgtctcacaatcgaaaaattcgtgtgagagcagatgattccgtgatggatttctataaaaacagaccatatatgattcgcagatcaaggggatatgcgccacttccgatccagacgtcaggaaaatggaaaggacaggtattagctgccggcggagaattgaaaaatacattctgtatcggtgtggatagtagattttatccttcggcttatgtgggggacttagaagatttaagaacggtaaatgcattgaaagagacaatacagcggatggaaacattgttagaagtggaaccaagcattgtcgtctgcgatatgcatcccaaatataattcgacggtggttgcggaagaactgggacttcctgttttgaaagtgcagcatcattatgcacacatcttatcctgtatggcagagaatgactggatggaacaggtgatcggagtatcttttgacggaaccggctatggaacggacggaaccatatggggtggagaaatacttctggcagatcttgacggattccggagaattggaagtattgaaccatttttacaggctggaggcgacctatcagcaaaagaaggatggcgtatcgcagtttctttaatctggcaaatatctgaatcaaaagatgaggcgatgcagatcattcagaaacttggtctttgcgaggaaaaagaagcgaaagttcagcttgcgatgcttgagagaaagatcaatgcggtagagtcaaccagtgcaggaagattatttgatggaatcagtgcgatacttggaattcgaaagaaatcttcttttgaaggagaagcctccatggcattggaattcgcagcagaagcttatgaaaaaagatctggtgagaagaaaataaatgttttagacgggcagaagtgtttaactgaatcagcaggcgacggaagagaacttcttctgacaagtcgactggtgagggcagcagtcgaagtggttagcaatattggcgaaaatgcagtggcagaagatacatttgatcaggacttaatagaaaaggcagcttatgaatttcataaaggactcgcagagcagattgttgcagcgtgtgtccatgctgcagagaaaaccggatgccggacagcagcgcttagtggcggtgtatttcagaatggattactgcttcgtctgacggaagacggattaattgcaaatggttttcatgtgctgacacatcagatgattccgccgaatgacggaggaattgcgcttggtcaggcattttatggaatgaatcatgaaagaaaggaatagaaaatatgtgtgtaggattatcagctaaagtggttcgcatcagtgacggaactgcagtggtagatgcaggtggtgcgaaaagggaagtatcttcagagttattagaagatctggagccgggcgattacgtgatggtgcacgccggagtcgcaattgcaaagatcacagaagaagatgacgaagagaccgatcagcttatggaagaactgctatagagcagtgaacaatggggtgaaaagaataaatgatgatgcaggatataacaaaaaatcaaacatctgaaagaaatgagaaacaaagaaaaacagcgagggaaatcatcgagcagtatgatggaccaccggttcgcattatggaagtgtgcggaacacatacacatgagatctttcgccttggaatccgcaaattacttccaaagcaggtggaactgatctcaggaccgggatgtccggtctgtgtgacaccggttgggtttattgatgaggcagtgtggcttgcacttcaagcaggtgtgacagtctgtacttttggcgatcttgtccgtgtaccgggaacaaagatgagtcttgcgggagcgagagaaaagggcgcaaagatccagattgtttattcaccggcagatgcagaaaaatatgcgaggttacatccggaggaacaagtcgtgttcctgtccgttggttttgagacaacaacaccttcttcttgcttatcagtaaagaaagcgaaagaagaacaactagagaattattctatcctgacggcaaataagacgatgccgggagcttatgaagcattaaaaggaagtgcagatgtgtttctttatccgggacatgtaaatgcaattaccggaacggcattgtgtgaatctctgacaaaggagggagtcagtggagttgtagcagggtttactgcgaaagaactgctgacagcattggctgtttcattgaaacgctaccaggaaggaaaaccattttttgtaaactgctatccaagagtagtaacagcagaaggaagcaaagaggcacagcgtcttgtagatgaactgatggaatcctgcgacagtgaatggcgtggtcttggagtgattccagattccggaatgaagcttcgtaaagagtgggaaatgtttgatgcaagagtgaaatatcagattccggaaatggaaggaagagcaaatccggcttgtcgttgtggagatgttttacagggaaaatgtaagccatcagattgcaaagtatttggaaaagtctgtacaccgcagcatccggtaggagcatgcatggtttcaaatgaaggtgcgtgttccgcttatttcatgtacggagtatagaagaaaatagaaatggttactgtgaacagtgacggaaaaagaggaaataatatgagtgaaaaaatagaaagccagacagttacaatggcacacggagcaggcggaaaacagacttcagaactgatcgacaaagtatttgcagcacattttgcaaatccggatctgacagcagatgatgcagccgtattaaatccgccggttgggaaaatggcagtgtcaacagatggatttatcgtatctccggcatttttcccgggaggaaatattggaaaactgtctatctgcggaacagtaaatgacctggcctgtatgggggcaaaaccattatatctgacttgtgcatttgtgattgaagaaggattcccaatggagaaactggagcagattgcggaggcaatggctaaaacagcgaaagaagcaggtgttcgcatcgtatcaggagacaccaaggtcgccggaaaaggacaggtagacggagtctttatcacaacaaccggaatgggacaaattgaagatggcgtacaggttggcggagaacttgcgaagccaggagatgcagttatcgtaaccggagatatcggccgacatggatgcacgatccttcttgcgagagaagatttcggaatcgaggcagatgtgaagagcgattgcgccccactttggaagacggtggaggctgttatggacacgacacatgaacttcatgtgatccgtgatgcgacacgaggcggtgtcggaactgtattatacgagattgcaggacagagccaggttggagtacagattgatgcagcaaaaatcccggtagctaccgaggtgcagggagtctgtggaatgcttggacttgaaccactttatcttgcctgcgaaggaacaatggtgatcattgctccggcagaacaggcagaaaagatcgtagagacacttcaccagtgtccatactctcaaaatgcagcgatcatcggaacgattacagaagaaaacccaggcaaagttatccgtatgacagaaatcggaacccagtccctcctcccacagccaggtggagagttgttgccacggatctgttaaaccagttccgaaatgcggagaaagttgtctcttcatgcgctgcaagctagcttgcataagcaagaagagacaactttctccatatggcgaacgccatacagcgaaatgaagcgcaagcggaattgagctgtagcatgaggaacggaagagagcaatataacaaaatgcggaaaggaatcgaaatggatacaagagtagcagtaatctccataattgtggaaaatccggaagcgatcgttacactgaatgatcttcttcatgaagccggaaattatattatcgggcgtatggggattccatacagggaaaagggaattaatatcatcagtattgcaattgatgcaccgcaggatatgatcagcagcctttccggaaagatcggaagactcaaaggtgtgtcagcgaagactgcctattcaaacatcattacaaaagcggaggcacagaatgattaaaattgcagtatatggaaaaggtggaatcggaaaatcaacaacagtctccaatgtggcagcagcactggctgagcagggattaaaggttcttcagattggatgtgacccaaaggcagattcaacgattctgctccgacatggggaagaggttccgaccgtacttcagatgtatcaggaaaagaaacagaacctgaaactggaagatattgtgaaaattggatacaaaggaattgtctgtgtagaagcaggcggcccaacaccgggacttgggtgcgcaggacgcggaatcataactgcactggaaaaactcgaagagacaggtgcatatgagaaataccagccggatgtagtgctttatgatgtgctcggagacgttgtctgtggtggattttctatgccgatgcgaaatgggtatgcagacaagatctttattgttacatctggagaaaatatggcgattcatgcaggtgcgaatattgctatggcggtagaaaactttaagaatcgcggatatgccacactgggagggctgatcctgaatcgaagaaatgtcctgcgtgaggaggagaaagtagaagaactggcggaagattttcatacaagtatcgtaggaactttgacaagaagtgatcttgttcagcaggcagaagaacagaaaaagaccgttcttgaagcatttccggaaagtgaaatggcagaagagtatcgtatacttgccaaagcaatcttgatgaaagtgagagaaaaacaagaggtgtcaaatgcttagaaaagttggagaatcagcctggccgatcagtgagaaagatgcggttgtcagcataaaagacgcatcctatccaattccgttcccacaagggctggaatttaattcaccggcacatggctgttggaatatcgttcatactggaatgctgattccggaagcacatcagatttatgtctgtgcggacaactgtatgcggggcgttgtgcttactgcagcagagatgcatgcagaagacagattttcctttgtgatcgtggaagaacagaatctgttgaatggagacctggaagatctgacaatcgaagggacggcagatcttataagaaaattaaagaaaatgccgaaggcgattcttttgtttacagtctgtattcatcattttatcggatgtgatctggaaagaatttacagagaattggaagaacaattcccggaaatcacatttctgagatgctatatggatccaatcatgcagaaacacggaccgacaccggatcagaaactcagaaaagcaatgtatgagtcattggattcagaacctgataaaatggatacaaaacagatttctattttgggaagtgactttgctttagatcaaagtagtgatctgaaagaattgttaccaaaagcaggttatacagttagggaattgcagagctgcagaacatgggaagagtataaagaattgggaaatgcaggaacatttctctgttgttatccatctggaaaatatgggatagaacttttggcaaaacgactggacagaacatttctttatcttccactgagttttgattatgaagaaatcaagaaggaagaagagattttgtggaatactttaaaacctgaagacaatcaggaactgttatcatggatagaaaagaaaatttcactctgtgaggcggcattagaacacacaaggcaagtgatcggaaacacaccgatttcaatcgactatacattccatccgcgtccgcttggattggcgaaactgttactgacacatgggttcaacgtagagacggtgtatctggacagtataagtccagaagaaaaagaagcttttgcgtggctgaaagagaagaaaccggagttggaacttcgttcaacagtccatgcgaaaatgcgtctgctacatgaggagcatgcaacggataagattctggcaatcggccagaaggcagcatggtttacaggaagccgatattttgtaaatcttgttcagggagcaggattacaggggtttgacggaatccgcaggactgccgaactaatggaagaagcatttttagaagaaaaagatccaaaaacgcttattgtaaaaaaaggatgggggtgtacaagctgtatatgagacaggcatatcgaattataccgatttatacctcagatgtatcgggagtctgttctgcactatatgaattaggtgggatggttgttatacatgatccttccggttgtaattccacttataacacgcatgatgaaatcaggtggtacaatcaggacagtctgatctttatttccggattaacagagattgatgcagtgatggggaatgatgaaaaattcttatctgatatcaaagaggcggcaggtgaattacatccgaaatttattgctcttgtaagttcaccgattccatttatgaatggaacagattttccggctttggcgaaagtgcttgagacagagacggggattccggccttcgcagtgccaacgaatggaatgcatgattatgtgtatggtgcaggaaaggcactggaggaaattgcgagaagatttgtttcggagcaaatggaagacagaaatggttcagaacgtacagtaaatctgcttggagcaacacctctcgattttggcccgatttcaaaagtagaagaactaaaaaagaatcttgagcagtatgggtggaagacgatttccacatgggcgatgggagattctttggaagatctggcacaggcaggaaaagcggagatgaatcttgtgatatcctctgtcgggcttagggcagcgaagatgctgaaagaaaaatatggaacgccttatgtgattggaacaccttataaagaatatgcagagagaatcagtgaagctttggaaaaacgcatccagattcccgctatagaagatcggagaagagagaatttacagggaactggtaactctgaaaaaataattacgttgatcggagaaccggttacaattggatctcttgctgcaattatcgaaagaagacaccattataaaacaaggatactctgtcccttagagaatgcagaaggattgctgggagagcatgatctgaagatatgcggtgaagaagagatggaaaacgccctgaaaaacgctcagatcgttgtagcagatccattgtatcgcccaatctgcccgattgagtgcgagttttatgagagagcgcacatagcattttcagggagaatgtttctaaaaaataaataagtagggatgacagatcaatactgtcaccccgtctttttcagataccacttttctatcaggttgattatcgcatacaacagcactgcaatgatacatagaatgcagatactcatcagaagccagtcaagtttaaatacctggctggaatagatgatcaggtatccaagtccgcttcttgcggctagaaattcaccgatgataactccgacaagacaaagtccaatattgactttcatattactgatgattgccggaatggaaccaggaagaaccactttggtcagcgcatgcctgcgttttccatgtagtgtgtagatcagacgaattttttcctggtcgatcgtagaaaaactggtgtagaggttcaggatacttccgaaaattgcaacggacattccggcaacaacaatggttgtggtattggcacccagccagacaataagtaagggcgccagggcagattttggcaggctattcaggacaaccatgtaagggtcaagaatttcggagagtccatggaaacaccagaggaggattgcaatcagaatgctggtaagtgtgaccagaagaaagctgacaagtgtctcatacaaggtgattccaatatggtgaaagacagaaccatcctctgtcattttcagaaaacaggttacgatacgggaagggctgctgaagataaaggaatcaacaactccggtatcggcacagatttcccattgtaacaggaataagaaaagaatcagaatccgcagaaagacgaccatccgtcggcgtctgcggatttttttgagaaaacgaagatgctcagttgtcatggtttagctccttccagatttgattaaagtagtgtttgaattcaggtgcattccgccgatttaaaggtgtgtcttgttctaatttaaagaaaatcggaatttcgcaacggactttggcaggacggttggtgaggacaatgacccggtcggaaaggctgattgcttccgatagatcatgagtaacaagaagtgcggtctttccactctgtcggataatctgaccgatgtcgtcgctgacggtcagcctggtctgataatccagagcggaaaagggctcatcaagcagtaagagttgcggatcaggcagcagagtccgaatcagggcggcacgctggcgcattcctccggaaagctgggagggacgtgcagaagcaaattgttttaaaccatattgttcgagaagctcatacgcacgttttttggttgcagtattcagtgtgccgcagatttccggaccgagggtgacattccggtaaatactgcgccagtccagtaaatgatcgtgttggagcatatagccaatcaggggggaattttccttgagagggataccatttaacaggatttctcctgcatctggcttcatcaatccacagatcagggagagaagtgtagatttgccacatccggaaggaccgacaactgctgtgaaggttccaggttgcacggaaaaggaaagatcagataaagcccttgtttctgcgtccaatgtgtgataagaataatatatgttatgaagttccagaagagaattcattgaagactccatttcagtagtagttaatgttatgatatgtaaaaataatcctgagagtgaatcaatgaacatgtcaggcgttttagaaaaaaggaatgattgatctggaacaaagatacaggagaatgatgaaaatgaacttacagaaaataaactatcagaaagaattggagaagcttctgacaagactggaaaaggaagaaaaagtaccaactcttttactacatagttgctgcgcaccgtgcagtagttatgtattagagtatttatcacagtattttaaaatcactgtcttctattataatccaaatatttatccggaaagtgaatacacaaagcgcatcctggaacaacagaaattgattgaagagatgcatttccggtatccggtatcatttttagccggtaaatatgaccgcgaccggttctatgagatggcaaaaggactggaagaagtgaaagagggcggttccagatgcatgggatgctatgaacttcgtctgaaggaatccgcagaaattgcagtagccggaggattcgactattttacaacaacacttagtataagtccgatgaagaatgcgcagaagttgaatgaaatcggacaacgtgtcggtgaagaatatggtgtacagtatctgctttctgatttcaagaagaagaatggatataagagatccatcgaattgtctggaatctatggtctttaccgtcaggattattgtggatgcgagttctcctataaagcacgtcaggcagaaaaatgtgtgtgaaatgacggaagaagtgattaaaatagcagaaaataagaaaaaatctacagaattcgtcgaaatcaggtatattttgcaagtttgtagtagacatttgacactttagtgtgataaactaatgggcaaatacgatataatagaaaaggggaaagacagatggcacagttatggggcggtcgttttacaaaagagacagatcagctggtttataattttaacgcatccatctctttcgacaagagattctatgagcaggatatccgcggaagtattgcacatgtgacaatgcttgcaaagcagggaattctgactgaggatgagaagaagcagatcattgacggactgaacgggatccgtgaggatgtggaaaacggaacacttgagattacagataaatatgaagatattcacagctttgttgaggcaaacctgatcgaccggatcggggatgcaggaaagaagctgcatacaggaagaagcagaaacgaccaggttgcactggatatgagactttatacaagagatgagattattgagcttgatggactcttgaaagagattctggaagttcttctgaaactgatgaaagagaatgtcgaaacttacatgcctggatttacacatcttcagaaagcacagccgatcactcttgcacatcatatgggagcttatttcgagatgttcaagcgtgacagatccagaatgaaagacatttataagagaatgaattactgtccgttgggagccggagcacttgccggaacaacttatccgcttgacagagagtacacggcagagcttctggattttgcaggaccgacactgaacagtatggattctgtatctgacagagattatctgattgagcttttgtcagcgatgtcaactgtgatgatgcatctgagcagattctcagaggaagtgatcatctggaattccaacgaatatcagtttgtggatattgatgacgcttacagtacaggaagcagtatcatgccacagaagaagaacccggatattgcagaacttgtacgtggtaagacaggaagagtttacggagcattgacctctcttctgacaacgatgaagggaattccgcttgcttataataaagacatgcaggaagacaaagaactcgtatttgacgcaattgatacaacaaaaggatgtctggcactctttacaggaatgcttaagacaatgaagtttaacgatgcacgcatggaagagagtgcgaagcatggatttaccaatgcgacagatgcagcagattatctggtgaatcatggagttccgttccgtgatgcacatggaatcgttggacaactcgtactgtactgcattgagcataagaaagcactggatgatatgacaatggaagaattcaaagccatctcaccggtgtttgaagaagatatttatgatgcgatcagcatgaaaacctgtgtagagatgagaaatacgatcggtgcaccgggaaaagcggcaatggagaaagtgatcgcaatcgaagaagcttatcttgtgacagagtaatgaatcatcacagcgagcaaaaataactgaatattttctttcattatataatgggaattgaaagagaacgtttggatagaaaataagaagaaaaaggagaagaaaacaatggagcagaaattaaaagtaggtatccttggagcaacaggtatggtaggacagagatttatttctctgcttgagaatcatccatggtttgaagttgtaacagtagcagcaagccctcgttccgcaggtaagacatatgaagaagcagtaggtgaccgctggaaaatggatacaccgatgccggaagcagttaagaagctggtagtcctgaatgtaaatgatgtagagcatgtagcatctacagttgattttgtattcagtgcagtggatatgtctaaagacgagatcaaagcaattgaagaagcatatgcgaagacagagacaccggttgtatctaacaacagtgcacaccgctggacaccggatgtaccgatggtagtaccggagatcaatgcagatcattttgaagtgatcaaagatcagaagaaacgtcttggaacaacacgcggattcattgcagtaaaaccaaactgctcaatccagagctatgcaccttgccttgcagcatggaaagagttcggaccaaaagaactggttgttacaacataccaggcaatctccggagcaggtaagacattcaaagactggccggaaatggttggaaatattatcccattcattggtggagaagaagagaagagcgagcaggaaccgcttcgtgtacttggtaaagtagagaacggacagatcgtgaaagcagagctcccgaagatcacatgccagtgtgtgcgtgtaccggttctgaacggacatacagcagcagtattcatcaacttcgagaagaagcctacaaaagagcagctgatcgagaagcttgtagcattcaagggattcccacaggaagcagaacttccgagtgctccgaagcagtttatccagtaccttgaagaggacaaccgtccacaggtaacagaggatgtgaactacgagcgtggaatgggcgtatctatcggacgtctgagagaagatacaatgttcgattacaagtttatcggactgtcccataacacagtaagaggtgcagcaggtggagcagttctctgtgcagaggcattgacagcaaaaggatatattgcagcaaaataagaaaatagaaaaggcagtggcagtacaaaaatagtcactgccttttatacgtatacaagtcgggaaggcagctgccaatccgatgaaagaaaatggggataaaaataaaaatggtatgagcaggaggattttatggagaaggagaaaaaaggaagagcgattgcactacttccaataggagtgtttttgatcatttttctcggtgcgggaattgtgttcaaagatttttatgcgatgccggcgatcgttgcgtttttgatcgcattgtttgttgcatttttgcagaataaagaattgagttttaacaagaagattgaagtgattgccaaaggtgttggtgaggaaaacatcattacgatgagcctgatctttctctgcgccggaggtttttcaggtgcagttactgcagcaggtggggtagacagtacagtcaatttaggattgtcattgatcccggcacattttgcagttgcaggtctgtttctgatcggatgttttatttcggtctctatggggacttccatgggaacgattgcagcacttgcaccgatcgcagttggaatcagtgaaaagacaggatttgcacttagtatctgcatcggagcagttgtgtgtggagctatgtttggagataacctttctatgatctctgatacaacaattgcagcagttaagacacagggatgtgaaatgaaagacaagtttaaggcaaactttttcatcgttcttccggcagcgattattacagtattaatcttctggtttgtaacaagaaatatgaatttccatttggaggaaaacttaagttacagcctttgggaagttcttccgtatatggttgttcttcttggagcacttatcggaatcaatgtatttgttgttttgatcagcggaattgtgatctccctgatcgtaggtgtaagcatgggacatattgcactttctgaaatgttccaggttgttggaaatggtgtgacatcaatgtatgacatcacagttatttctatcatcgtagcatgtatcgtatcacttgtgaaagagcatggtggaatccagttcattctgaatctgatcaagagcaagatcaatggaagaagaggagcagaattcggaatcgcacttcttgccctttttgttgatgcatgtacagcaaataatacggttgccattgttatgacaggaccgatcgcaaaagaaatcagtgaagagtttgatgtagatccgagaagatcagcctcacttctggatatgtttacatctgtaggccagggtatcattccatacggagcacagcttctgtcagcagcaacactgactggattgacaccgcttcagattattccgaatctgtattatccgcttcttatgggagtatgcggagttttggcaatcatcttccggccacagagtaaaaaactacagtaaagtaaagtggtaacttaaaaaagcaaaaataatatattttcttgtggtataagaaaagttgtgttatacttgcagacaagagtgattttcactggaaactaaaagtaagaaatcaagataaaagagggatgtaaggatgaatctattatacaaaagcaccagaaattcagacaagactgttacagcttcacaggccatcttaaagggactggctgatgatggaggactgtttgttcctgtatccgttccgaagctggatgtaacaatggatgaacttaaagacatgtcatatcaggagacagcttatgcagttatgaaacagttctttacagattttacagaagaagaactgaaacactgcatcaacagtgcttatgattcaaagtttgatacagaagtgatcgcaccacttgtgaaggtgggagatacttatcatctggaactgttccacggagcaacgatcgcatttaaagatatggcactttctatcctgccgcatctgatgatcacttccgcaagaaagaaccaggtgaaaaatgatatcgtgatcctgacagcaacttccggagatacaggtaaggctgcacttgcaggttttgcagatgttccgggaacaaagatcatcgtgttctatccaaagggaggcgtaagccacgttcaggaattacagatggtgacacagaagggagagaatacttctgttgtagcaatccatggtaactttgataacgcacagagcggtgtgaaggcaatctttgaagacaaagagctggcagcagaattagatgcgaagggatatcagttctcatcagcaaactccatcaatatcggacgtcttgtaccgcaggttgtttattatgtatatgcttatgcaaagctgcttgagaatgaagagatccaggcaggcgaggagatcaatgttacagttccgacaggaaactttggaaatatccttgctgcatattatgcaaaacagatgggcgtgccgatcgcaaaactgatctgtgcttccaatgataacaaggttctctttgatttcttccagacaggtgtctatgacagaaacagagaatttatcttgacatcttcaccgtccatggacattctgatctcaagcaacctggagcgtctgatctacacaatcgcaggacaggatgcacagaaggatgtagagctcatgacacagctgaaagaaaaaggtgtgtatgagatcacagctgagatgaaggaaggtctgaaagactttgtcggaggatttgcgacagaagaagaagtgaaagagacgatccatgacacatatcagaagacaggatatgtgatggatactcatacagcagttgcagcacatgtgtgtgcacagtatcgtaaagatacaaaggacgagaagaaatgtctggttgcttccacagcaagtccgtacaagttcgtacgcaacgttatgacagcaattgatccgaagtatgatgagatggaagactttgcactgattgatgagcttgaaaaagtatctggcttcccgattccaaatgcgatcaaagaaatccgtgatgcagaggttcgtcatacaacagagtgtgatgcagatcagatgaaagagacagtaaaaaatattcttggggtgtaaaaaaatggataacagcttgtggggatttataggtatttttgttctatgttgtggaatttacgcattgtattcctttgttataatgaaagtaaagggcgagatcaatgcatcaattctcctgggaaaagattatacttataaaaaatgtaaggataaagaggcttatatagcaaaaacagctccggcactttttgtctttggactggtatctgtgatctatggagtgatcgatgtgattcactgttatgttcatacaatgacaatagtagatacagttgcaatgattattttccttattgtattgatctggttcggtgtttatacaagaaatctcagaaacagatattattaaaaatgtcagttccgtttctttttgctgacagaaactatgagaaacacgctccgtgagtttctcaagttatcgcggcagtcgccaaggtctcgtgcaagcacggactttggctcgttgctcgcgtaaatgcaaaaatccacatatttacagttgtaaaaatgatgtggatggagtataatagcaataggttaagaaagaagaaaaacctgaaatgtgcgagaaccctgatattttgaacctacattatttaaaaagggattccgataagactgagtaatatgccaggcctccgtttttgcagtggacggcagaaaagcaggatgaggttgcccacctagccgtggctaggactcaaaatacagggaacggcattttggggattagacaaaagataaagttaagggacagctgaagagattcggctgtctttcttttttgcttgaatattgagaatagttatggtattatccatgaagtaacaatttcgtgacggctgagaagaaacataagccgttctgagtatttaacctggggagttaaagaaaatggagaagtttaataagataaaagatcgtggattgcgaattgcagctaccgtgagttcgcatcacacgggagctttcgcagcacaggcggcatatttctttgtgctttcattgattcctatctttatgttgcttttaacaatggtacaatttacaccagtgacgaaagcggatgtgatggaggctgtacttccggtatttccatccacagtcagcccaatgattgaaagtattgtgaatcaggtatatatgacttccggtacgatcattcctttgacaatccttgtagctttgtggtcagcggggaaaggagtactttctgtaacatatggattgaactgcatttatcaaaacacagagacgagaaattatttttaccttcgcgcaagagcatgtatgtatacttttttgttccttgtggcaattatgctctcattggtgctttccgtattcggtaacagtatcagtgttgtggtttatgaacatgcaccgcttataagcaaagcaattcataagattatacatttgaggatttatttcacacttccgcttctgactttcttctgggatctggtgtacaagtatcttccaaatcgtggtgcggaaggaaagacgactcttcggaaacaattgccgggcgcattctttacagcttgcggctggatggtactgtcctttatcttttctgtttatttggatatttttaaaggattcactaatatgtatggtagttttacaacaatcattcttgttatgttgtggttatatacgtgtatgtatattattctgcttgggggagaaatcaatgcaattttagaaggggttaaaagcagaaaataagaaaaacacaaaaagtacacaaataattgacagaagaataattaaggcgtatactacaaacgtatgaatatgccgcaatgtaaagattgggtagataatagacagaattgatgttattagcggtatagcctctcagatacaagatggaagtcagaagttttttgatgtaatgagtgtctctatatattatatcgaaagatttttgaaatagtaaaaattgttttttataattaaaatggtttttgcgataatttataagaaggggggttagaagtcatacaaaagagacttatactcataattaagaaaggaaggaaagatttgttatgaaaaagaggatgagaaaactccttatttcaagccttacattagcgatgttactggttaattcgctgaatgtttttgctgctgaaacaagtgaggatcagacgacaaatgttgacgtaccgcttggagtgacatctgaacatacaatggatgtagagtctattccggcagaaacagcagaggccgttttgaatgtgacatttgcaacagtaaaaggtgagtatgttggaagcacaacagtaaaagaatcagctgcagaaggcgagggtgtattaaagacatttgaacttggaacagatttccagctgccagaaggatatcagctcgtatcatgtgtaccacagatgacaaagattaaagtagcttatggcacactgcgtgtacgcattatgatcgtagaaaagattccggctgtagatccagaaccaactccagatccagaaccaactccagatccggagccaactccagatccagagccgactccaactccagatccagagccgactccgactccagatccagaaccagctccaaatccagagccgactccaactccagatccaaagccgactccagatcaaactacacctgtaaatccaactccggtaaaaccagctgtagaaaaggataataacaaaacaaatgacaatacaaacaagaaagtagatacagcagataagaaaacaacaaagacagaagctcctaagacaggagatacagctaatatcgcaatgaatgtttttgtaatggctatttgtggtgctgcaattgttactgttattttcagaaagagatttacacgtagataataagaattgtcttgatttgaattaagataatacataattgccagaagtgtctaaacagatgcttttggcaattttctttttatcaaacaaaaattgtacactataataggagttcatttagacttgacaaaaagaaatgctgtgttaaaatagactggtaaattcacttagaatatgaaaagtttattagatttgaaaagcgaagatcgtgcacagtagagacctgttttcttgcagagagagagaatcatcggctgaaagttctcttaagttcagatagcgattgaaattcacacgtgagctgcatttttgaaaggaagcatctaagggacagtcaggagaacggatatgttcggatgtgaaaagtagagaatgtcgtatgttgtacgttacacaacttagagtgcctgtagatcagaatgcaggaatcagggtggtaccgcgagtgattcagacctcgtcccttttgggatgaggtctttctttatgaaaacgttcgtccctgataagtgagttaagaaaggagaaaacgatgaaagaaagactggaacagattaaagcggaagcagtcgcaagaattcaggaggctgacgttccggagaaactcaatgacgtgcgtgtaaagtttcttggtaaaaaaggtgaactgacagccgtattaaaaggaatgaaagatgttgcaccggaggaacgtccgaaggttggacagcttgtgaatgatacaagagcagcaattgaggaactcttagaggaatctaagacaagaatggagaaagcgattcgtgaagagaagctgaaagcagaagtaatcgatgttacacttccatctaagaagaacagtgtaggacatagacatccgaacacaatcgcactggaagaagtagagcgtatcttcgtaggcatgggatatgaagttgtagaaggaccggaagttgagtatgatctgtataactttgagaagctgaacattccggcagatcatccggcaaaggatgagcaggatactttctatattaataaagatatcgtacttcgtacacagacatctccggtacaggcccgtgtgatggagcagggaaaacttccgattcgtatgatcgcaccgggacgtgtattccgttccgacgaagtagatgcaacacattcaccatccttccatcagatcgagggtcttgtgatcgacaagaacatttccttcgctgacctgaaaggaacacttgaagtattcgcaaaagagctgtttggaccggacacaaagacaaaattccgtccacatcatttcccatttacagagccaagtgctgaggttgatgtaagctgctttaagtgtggcggcaagggatgtcgtttctgtaaaggatcaggctggatcgagattcttggatgtggtatggttcatccacatgttctcgagatgtgcggaattgatccggaagagtacaacggatttgcattcggtgtaggactggagcgtatcgctcttctgaaatatgagatcgacgatatgcgtttattatacgagaacgacatcagattcctgaaacagttctaacgagcgcgataaaatcttcaagcggcgcgaatgcggcgcggcaacggcgcagagccgttggattttagagcctcccttttgaacagaacaaaaatagaaataaggagatataaaatggatacttcattatcatggatcaaagcgtatgtcccggatcttgacgtgacagcgcaggaatatacagatgcaatgactctgacaggaacaaaggttgaaggattcgaggagctggatgcagaccttgacaagatcgttgtgggtcagattgagaaaattgagaaacacccggatgcggacaagctggtagtttgccaggtgaatatcggagctgaggttattcagatcgtaacaggtgcaaaaaatgtgttcgagggagcgaaagttcctgttgtattagacggcggacgcgttgcaggcggacatgagccgggacagagagttgccggtggaattaagattaagaaaggaaaactccgtggagttccaagttacggaatgatgtgctctatcgaagaacttggttctacaaaggagatgtatccggaacagccggagaatggtatttacattttcccggaggacacagaggttggagcagatgcgatagaacttcttggtcttcatgatgttgtttttgaatatgagatcacatcaaaccgtgtagactgctacagtgtagtaggtatcgcacgtgaagcagctgctacatttaataaagagtttaaaccaccggttgtgacagagacaggaaatgatgaggatgtcaatgactatgtaaaggtgactgtagagaatacggatctgtgttccagatactgcgcaagagcggttaagaatattaagatcggaccatcaccaaagtggttacagcgcagactgtcatctgttggaatccgtccgatcaacaacctggttgatattacaaactatgtaatggaagagtacggacagccaatgcatgcttatgatcttgatacacttgcaggacatcagatcgtagttaagaatgcacaggatggagagaagttcgttacactggatggacaggaaagaacaatggacaaagatgttctgatgatctgtgacggagaaaaggctgttgggattgccggaatcatgggaggagagaattccatgatcacagataacgcgaagacaatgctttttgaggcagcttgttttgacggtgtgaacatccgtaagtccagtaagcgtgtcggacttcgtacagatgcttccggtaagtttgagaagggacttgatccgaacaatgcgatggcagcactgaaccgtgcctgccagcttgtagaagagcttggagcaggtgaagttgtcggaggagcaattgacgtatacagcaagaagaaagagcctgtacgtgttccatttgatgcagagaagatcaaccgtatgctcggaacaaatatttccgaggaagatatgcttggatatttcaagaaaatcgatcttgattacgatgcagagacaaaagaagtgatcgcaccgacattccgtcacgatctgttcagattagctgaccttgcagaggaagttgcaagatttttcggatatgacaatatcccgacaacacttccgtctggagaggctacaacaggtaagcttccgttcaagcttcgtattgagcaggttgcaagtgatattgctgagttctgtggattcagccagggaatgtcttattccttcgaaagtccgaaggtatttgataaacttcttctcccagaggattcaaagcttcgcaatgcaatctcaatcatgaatccacttggagaagattacagtatcatgcgtacaacatccttaaacggtatgctgacttctcttgcaacaaactataacagaagaaacaagaatgttcgtctgtatgagatgggtaatatttacattccgcaggagcttccactgacagagcttccggatgagagaatgcagtttacacttggaatgtatggagatggagatttcttcaacatgaaaggtgtagtggaagagttctttgagaaaatcggtatgaagggcagagaaaaatacgatccgaatgcaggaaagtcattccttcacccgggacgccaggcaaacatcatttatgatggaaaagtagttggatatctcggagaggttcatccggaagtcgctgatatttatggaatcggtgagcgtgcatatgttgcagttctggatatgcctgaaatcatcccatatgctacatttgacagaaagtacacaggaattgcaaaatatcctgcagtgacaagagatatcagtatggttgttccgaaagaaatccttgtcggacagattgaagatgtgatcgagaaaaagggcggcgctcatttagagagctttaacctgtttgacatctatgaaggtgctcagatcaaagcaggattcaagtcagttgcttattctatcgtattccgtgcaaaggataagacactggaagaagctgaaattacagcagcaatggatcgcattctttccggtctggaagaacttggcattgagttgagaaagtaagaagagagggtaagagcattgaaaacaagtgatttttattatgatcttccggaggaactgatcgcacaggatcctttggaggaccgctcttcctcccgccttatgatacttgataaagagacagggaagacagagcatcatgtatttcgtgagattatcgatgaactgaatccaggagattgtctggttatcaatgatacgaaagtaattccggccagactgatcggagcaaaggaagacaccggagcaaagatagaagtgcttcttttaaaacgaggagcagatgatgtctgggagacattggtaaagcctggaaaaaaggcaagaccgggagcaagaatcagctttggagacggcctgcttgtcggagaagttatggatgtagtggaggaaggaaatcgtctgatccattttgaatacgaaggaatcttcgaggagattctggaccagttaggacagatgccgcttccaccgtatattacacatcagcttcaggataaggacagatataatactgtctatgcggtacactcaggttctgcggcagcaccgacggccggacttcattttacgccggagcttttggaagagattcgtgcaaaaggggtagagatcgcaccggttacacttcatgtcggacttggaacgttccgtccggtgaaggtagatgatgtggagcatcaccatatgcattcagaattttatatgattactgaagagtctgcacagaagatcaaccatgcaaaagaagcaggacatcgtgtcatctgtgtcggaacaacaagctgcagaacaatcgaatccgctgccgatgagaatggaagattaaaagaatgcagtggttggacagaaatctttatctatccgggatatcagttcaagattctggatgcgctgatcacgaacttccatctgccggaatctacactgatcatgcttgtttctgcattagctggaaaagagcatgtgatggcagcgtatgaggaggcagtaaaagaaagatatcgtttcttcagttttggggatgcgatgttcatacgatagaaagggacaacctatgtcagaaaatgattttatcattgtagatgaagaagagacaagcaaggaagacaacagacaggacactggcagagaagaagaaaaaaaagaagtgacaacttctgaccattctgaaaaagatgatgacggatatgagagaatatgttttatttgtcatcgcccggagagtgtgactgggaagatggttgagcttccgaataatatcgcagtatgtccggattgtatgcagagaagcttcgatatgatgaacaatagttctatggatctaagcagcatgatgaacattccgggggtacactttatgaatctttctgatcttgataatctgcagccgaaggcacagaagatcaaaaagaaaaagaaagagccgaaagaattcaaacagctggatattaagaaaattccggcaccacataagatcaaagcacgtctggatgaatatatcgttggacaggagtatgcaaagaaagcaatctctgttgcagtttataatcattacaaacgtgtagcaacaggaacaatggatgagattgagatagagaaatcaaatatgctcatgattgggcctacaggatgtggtaaaacatatctggttaagacactggcgaagcttttagatgtgccgttggcgatcacagatgcaacatctcttacagaggcaggatatatcggtgatgacatcgaaagtgttgtttccaagcttcttgcagcagcagacaacgatgttgagcgtgcggaacagggaattatttttatcgatgagatcgataagattgccaagaaaaaaacttccagtcagagagatgtgagtggtgaatctgtgcagcagggaatgctcaaactcttagagggaagtgaagttgaagttccggtaggcgcgaacagcaagaatgcaatggttccactgacaacagtgaatacaaaaaatattctgtttatctgtggaggtgcattcccggatcttgaagacattatcaaagagcgtctgcagaagaaaacgtcgatgggattcaatgcggaactgaaagatacagtcgagcatgatgaagagctgctctctaaggtgacaattgaggacttaagaaaattcggtatgatcccggagttcttaggacgtcttccgattgtatttacattaaagggactcgacaaagagatgcttgtcaagattttaaaagagccgaaaaatgcaattttaaaacagtatcagaagctgttggcattagacgaagtgaagcttgagtttgatgacagcgcattagaagcaattgcagaaaaggcaatggaaaaagataccggagccagagcactgcgtgcgatcattgaggagtttatgctagatattatgtatgagattccgaaagatgataatattggagaagtaacaattacaagagcttatatagaaggtaccggcggaccggttattcagttgagaggccaggcagtaccgaggttagatggataaagtgagattttagaaagagaagttttgttcaaaaatctgaaaactgattggggaattagtttaaaaaaatcacaaaaaggaagagagaaaaatggacacatacagatacttactggatttagcaattattcttatatctacaaaattacttggactattaacaagacgagtacagatgccgcaggttgttggcgcacttctggcgggattgatcctcggaccggcaggatttggaattctgtcagagacttcatttatccatgaagttgcagaaatcggagttattgttctgatgtttactgcaggtatggagacggatatcaaagagctgaaagcaagtggaaaagcttcttttattattgctctttgtggtgtgatcgttccactgatcggaggttatggtgttgcctggttctttaaccgtccaagcatggcaggaagcaacctgtcatcccctgtagttcttcagaatgtctttattggagttgtactcacagcaacgtctgtaagtattacagtagagacattgaaagaattaggagcattgaagagccgttcaggaaatgcaatccttggtgctgcgatcattgatgacgttctcggtattatcgcactgacaatcgttacaagtcttgcagatgattctgtaaagattggaatggttctgattaaaatcgtgggattcttcgtattttcaggtgttgtaggatttgttttctataagatgtataagaaatgggttgacggagctgagaaggaactgcatcgtcatacgattattgcatttgtattctgcctgcttatggcatttatcgcagaagaagttttcggtgttgcagatattacaggtgcatatatcgcaggattaattatttccaacgtacagagatctacttatctggagtctaagtttgatacgttgtcttacctgcttctgtcaccggtatttttcgcaagtatcggtctgaaggtaaaccttccacagatgtcagtatccatcattatgttcgcagttgttcttacagttgtggcagttcttactaagatagtcggctgtggacttggtgcaaagatttgtggttacaagaattatcaggcgaaacgaatcggagtgggaatgatctcccgtggtgaggttgccttgatcgtagcaagtaaaggttccgcactcggacttatgagttcttccatcttaggaccggttatcgtagtggttgttattacaacagtcatcacaccgattcttctgaaagtagtgttcgctcctggaacaggaccgtcaacacaggtagaagatgctaagaaggttacaagctactatgagaatcgagaagataacagatagaacaaaagagaaaagaatcgataaaagatactgtagaaactttgaggtcatgggacagttaaagctgtctcatgacctcaaatgtgttatagaggtttaattgtccgtatccccattcacggttagggtattccatactgtctggtcggatggctccaagaacaagaaggcttttgatctggaatacgtcgatgccgggcattttgcgttcatagagctgccattctaacataagtgcgactgccccggcggtgatagcggctgcggcgcaggagccgctgcgcacggcaaaacggtctcctggaagagcgcctttaatattaatcccgggagcagtgatggaaggattttcaaatcttgttcttgtatagccgcgtccggatgcctgggcgactgcaccattgctgccgtcgtaataggagaccgtcagaggactaggggcattggccgggtttgtaagagtcgtgtaaggatctgattcaaggaaatagacttctccgtctaaaaattctgtgacaggaagccagatatggaaatcaccattaatcaggcgggtcggttctacgatgattttccagatgccttctgccggggtacggaaacggaagaagatgagttcagagtttgctttttcgaccagaagccggtagtcaacagagacgcgggtcttttcaaagagaaaatcaatgtctgcgcttgtgcctacatgaaatggaattttggatgtattttccccggacggtgaaataattgaaattgagaagagattggggatcagtacccaaagttccaaagtgaaaccggatacattttcaccaacccggatctctacagttttacggtcattttctgactggatcgtattgaaataatgatgacgtttgtctgcttcatttcccgtgccgaccacagcaatccggtcgggcatcagactgtagctgccgagtaatgcgggaagcggaagcgtgccgacatgaccgccaagattagagcctatagtgatacacatgacaagtggaagccccagttcatctgccagatcatttagatattttaatccaaggatcagatctgtttcctgatagcagacggctgtttccgtgatgcagtaataatcccgcagatattgcttcgcttgttttaatttgacaacagcgagagtagattccggggcggctcccagaaactgttcgtcagcgtcagcatttccggcagcgagactggcaatataagttccatgtccgtcgatatcgacagaagggacctgtgacagtggggaatcagaagaaagtgccagatcaatctcttccttacggtattcacttccgtagaagaagtctctgggtggagttccgctttggatagtctgatcccaaagtgccgcaattcgcgtggtaccgtccagattgcggaaaactttgttttgatagtcaatcccgctgtcaagaaatccaatcagaacgccttttccttttaattgaagtgccggatagttctgcacaggaaggatgccggtctggttcaatgtttccatagcgacaggagcaaaacaattcggaatggaattataagaaaaacgcgtcagagagattggctctacaagttctttggaaaagtaaatgcactgatatccaagcccggcatcctggatacatggatcttttttcagaagttcattgaacagtggagtgcgcagcggattactgatgaagtcgcgtgtatcttcggagagtatctgttccctgcaagtttcaagatcattcataagatgactcctaagttgagttgtagaaaggatatgcaagaaggattctatttatgaaattagtctaaaaataatagaaaatgacttcaaaaactggaagaatacgatataataagaccaagagaaattgtagatcacctttctggtggttgagatgatacagcaatgataagaagggagatttcagtatgaaagatttttttgaagatttaggaaaacgtctgagcgagacagcagaggcagtgacagcaaaggcaggagatgcgattgagatacagaaattaaaagcacagatcagagagcttgcaagaggaaatgcagaagatctgatggaacttggtcagagtatttatgacagatttgagaatggagaagaactggatgaggcttccaagggactgtgcgaggcaattgcaagccgcaaggaaagcatggaagagtatgagaataagattgaagggctcaaaggtgcgtgtgagtgtacacggtgtggtaagatggttgcgaaagatatggctttctgcccatactgcggatcacctgtagcagaggaagaagatatttttgaagctgatgatctggctcaggaagtaagagaagaggcagaggaagcagaagagagcgttgcagaggctgcggaagcagcagttgaggcggttactgaggccgcagaagaagcagtggatgcagtagaagagtctgtgaaagaagagacagaagaatagtttcaaggatttaagggagaatggaacgtgaaggttgttatattaagttttacacaggcaggaacaagacttggtgagagaattggaagtcagttccggaacgaagggattacgtgtcagaactatgcacctgccggatatgcattcgctgacattcttccgtttccggacaatccaaaagagctgatcagggaaggatggggagagacatccttcctttttattggtgcagttggaatcgcagtgagatatattgcgccttatgtaaaggataaattcactgattcagcggtcgtagtcatggatgaaaaagcagggtatgtgatcccactgctgtcaggacatctcgggggtgcggtagaactttccaatcagcttgcaatatggaccggtgcagttccggtacagacaacagcgacagatgttcagggaaaatttgcagtagatgtttttgcaaagaagaatcacctgtattttacagagcgcgaagcagcgaagcagatatcagctgcagtgctggatggaaagcaggtcggtctgtggatcggtgaaggactggtatttgaacaggaagattttcagaaaagctgtttaaaagaacttatactatgtggttcacaggaagaattgtactcctttgcagaggaacatcctgtgatcgtgatcacaaagaccgcagaagaagggagacagttcgtggaatccctagcgggttctctgtggggagatgtcaggaataacgtatgtggatgtgagcgtaagccatgcattctccttttgtatccaatcaatatcacggcaggagtaggctgtagaaaacagatttcaaaagaactttttgaaaagggtctaaacgatgttctggaagggtatggacttgaacctacgcagttaaaacagcttgcatcgatcgatcttaagaaagaagaacctgcgattttggcctatgcgcagaaatataaagtaccgtttgcaacttatccggcagaacagttagagaagattacagaggtatcagccacatcacggtttgtgaaacaggtgacaggtgttgacaatgtgtgtgagagagccgcacggacagcagatgctgacggagaactgctgtgtcccaagtgcataagagagcagatgacggtggcattgacagagacagaagtaacacttcaattttaaaacgaaagaaagttccagaatcttccgacattctggaactttttttctactaaagtatctgttcttttgactggagtgcatcatatcctgtctcacgggtgcggatcttcatggcacttcggatttcatagctgaagatcttaccatcaccgacttcaccggtataggcagctttctggattgcttcgattgtttttttctcccattcttcggaagagacaacaatttcaaatttgattttcggctgcatgaaaatctcaatctcagaaccacggacaatctccttataacctcgctgtgcaccacatcccatgacctgggagaccgtgataccattgacttctatttcatttaaggcagccttgacatcctcaaatttctcttcccgaacgatagcttctactttaatcatcattttaaaaatcctcctgtattaatggatatataaattttggacagattatattagtcgaatccgttgaaggacggatatgcattttcaccatgttgggagatatccagtccaagagcttcttccttctgatctacgcgcagtggagtgaagatacggataattccaatgcagatcagagtaccgacaactgcaacagccgtagtgatgataatgcttaatacctgtgcaacgaagagatgaacattaccgaagaccagtccgtcccatcttgcaacagagttaatagaagtttttgcaaaaagtccggtggcgattccaccccacacaccgccgattccatggcagccaaatgcgtccagtgcatcatctattttcagtttatgcttaatgaagttcattgtaaagtagcagatcgggctgaccagtgcaccgatgatataggaagaccagatcggaacaaagccagcaccaggtgtaatagcaaccagtccgacaaccagtccggtagaagcaccgaccagagtaggcttcctgtctttgatcacatcgatcagcatccaggatacgagagcaactgcggaagaaattgcacttgtcataaatgcatgggctgcaagtccatctgccgccagggcacttcctgcattgaatccaaaccatccgaaccagagcagggaagctccaagcacaacaaaaggaatattatggatacggtaagatgttttttcgtatccttttcttctgccaagatatgttgcgagaaccagggcgctgacaccggaactgatgtgtactacatttccgcctgcaaagtcaacggagccgattgctgcaaggaatcctccctctccccagaccatatgagccatcggatagtaaacgaggaaagaccacagtgcaataaatgcgaataatgccttaaatctcatccttccgaccacagcaccggtgatcagtgccggagtaatcatggcaaacatcatctggaatgcagcaaatacaagatgcggaatggtatccgcatacggaccggcttcccagccgacatcatttaaaaaagcccagcggaaatctccgataattccggcgtgattgccgccaaaagaaagagaatagccaaacatggtccaaagaagaacagatagtcccatgatcgcaacgcaggccatcattgtgttacatacattttttctccgcacaagaccgccatagaagaaggcaagtcccggtgtcataaagaagacaagcgcagtgcagatcatcataaaagcagtgtttccggtgttcattttctaaatcctcccaattcatctgataatgcaaaaaagacgcctgatagaaaggcaatctcttacctttctgtcagacgtctttgtcttgcatattaagatatcacggcttttggaaaaatgcaagagaaaattttgtggttgccggtcgcacacagtatgaacagtaagtaacttatgcggaacaagttgaagaaaacgtgtttttgctttataatcagtgacagagtaaaaagaaagggttcgatggatgattatgaaagagcatacgcatttccgtgaggacggaacagaatatacccacgtgcatcataacggagatggggtggcagagtcacatgtacatcatcacgatcataaaggagcaggtcatgttcatcgccatgtacatagtgcagaagagaagaggaaggttatgaatcgtctgtccagggcaattggacatcttgaagctgtgaagcgaatggtggaacgtgatgaggattgcagtgaagtgctgatccagcttgcggcagttcgttctgcgatcaataatacaggaaaagtgattttgaagaatcatctggatcattgtattgtggaagctattgagcagaatgatatggagacaatccgtgctcttgacgaggcaatcgataagtttattaaataaatgtaaatgtgggtgatttgatgaagaaaaatattcttatttttgccggtacgacagagggacgacagctggcagaatacgccgttaaagaaggaattccctgtatcgtaagtgctgcgacagaatatggggaagaactattggaaaatgatctgcagttgcgaaaagagaagcataagaaatcagaacttcgagtgatccacggacgtatggatcagcaggagatggaagcattctttgaaaaagagcaggtagggcttgtcatagatgcgacgcatccatttgcagttatagtgacggaaaatatacagcgggcatgtaaaaacagcggaatagagtatttacgatgtttaagagattttttgacagaagcaaaggcagtcaggtcagaaaagtttgcttgtgaaagaacaaatgcgattagtaagagtgacagttctgtagtctgtgtgaatagcgtggaagaggccgtggactatctcgagcagacgcagggaaatatactgataacaacaggcagtaaagaactggataaatatacttgtttgacaaattataaagagcggtgctatgcaagagtactttccgtactcccttcagtgatgcagagtatagatctcggattttcagggaagcatctgattgcaatgcagggcccgttttccagggaaatgaatcttgcacttcttcatcagacagaggcaaaatatttcgtaacaaaagaatccggaaagaatggaggatttgcagaaaagcttgaagcagcagagcaggcaggtgcagttcttctcgtaattggaaggccgatagaagaaggcttgtcggtagaggaagcagaacaggagatgagaaaatggaacagggattgatacacatttattgtggagatggaaaaggaaagacatcagcggcaatcggacttgcagtacgtgcagcaggaagtggacttaaggttttatttacccggtttttaaaaaatgaatcttccggagaactggcgattctcgatgatatttctcagattaaagtacttcatcttgaaaagtcttatggcttttttaaaaatctttccgaagagaaaaagcaggaagtaaaggaaacttacttgcagctatggagagcgattgaactggagattcttaccggaagatatgatgtgcttgtgatcgatgagtttatggcagcttataggtatgatctcatcccgaaggaagaagcgatcgagttcctggagaagaaaccaaaagaactggagattgtattgactggacgaaatccggatgaaaagcttgtagaactggcagattatgtgtcagaaatcaagaaagtgaagcatccgtttgatcagggaatctacgcgagaaaagggattgaatattgatgaaggaaatcggaagaacaagatcgggacttcagatgggatatacgaccggaagttgtgcggcagcggcggcaaaagcgtcagcagagatgttattgtcgggagaagagattcgccaggtgagattgctgacgccgaagggcattgaactgtatcttgagttggaagagatcatgcgtacgaagtcagaagtttcatgtgcagtgcgaaaatacagtggagacgatccggatgtgacgaatggaatacttgtttatgcaacagttcaaaaggtagagaagaagagtaaaataaattcggagaatagtgtgaatctttctgagaaaatcaatctggatggtggtgttggaatcggtcgggtaacgaagcctggactggaacagaaaatcggtcaggcagcaatcaacaaagtaccgcggagaatgatctgtgaagcagtggaagaagtttgcaggaagtatgaatatacaggaaatctgcaagtacgcctatccgtgccggaaggggcagaggttgcaaagaagacatttaatccaagactggggattgagggaggaatctcaatcttaggaacaacaggtatcgtggaaccaatgagtgagaaggcactgacggatacgatttatctggaaatgaagatgctcaaagaaaatggaacagattggtgttatgttgtcccgggaaattatgggatggacttcttacggaaaaagctgcatgtggacaccgcattttcagtaaaatgcagtaattatgtcggtgagacaattgaggatgcaaagcttcttggaatgaaaggaatcttgttgatcggacatataggaaagtttattaagctggccgcaggagtgatgaatacgcattccagacaggcagattgtcgaatggaagtacttggtgtgcatgcagcaatgaatggtgcagatgcagcagttgtgcgggaaatcatggattgtatcaatacaacggaagcaatggaaatactgcgcagggagaagttgattgagccggtgatggaaagtgtgatgaaacgtattgaattcttcttaaagaacagagcaggagaagaattggaaatcggtttgattttattttcaacagaggatggcattcttggaaagtcagaaaatgcggatgagttgttaaagaagatacaggagaatagatgaaacaagcaggaaaattttatggaatcggagtgggaccgggagatcctgaattaatgacattaaaagcagttcgaaagatcagggaatgcgagataatagtacttccgatttctgatagagaattgacagaaccaatgttgcttgagcaaaatggaaaagagaacaaggcgttaagatatttagaaggctgtacggcatatcagattgcagtgcagacagtttcagagcttaaggaaaagcagattctctttctcccaatgccaatgatcaaagataaggaaaagctgagaaagattcatgcacggggagcagaagtgatagagcagcttcttgagaaaggatggaatctggcattcctgacgctgggagatccaacggtttattctacatgtatgtatatagagcagatgattgaacaggatggttatcaggttgagacagtttcaggaatcccgtcattttgtgcagcagctgcaagattgaatcagccacttggagaacaggaagagcagattcatattttacctggctcttatgaggcaggagaaggtttgcagttatcgggaacaaagattttgatgaagaccgggaaaaagatgggacagataaaagagtttttacaggggagcagtcaggatatctgtcttgtagaaaactgtggaatggacgacgaacgtattgtccgatcagtggaagagatttcagaagatgcgggatactattcccttctaattgtaaaagacaggaaaagatagaaaaggcaggaagaattatgattacatttgtaggagcaggtccgggagcagaagatctgatcacagtacgcggacaaagacttttgaaagaagcagacatcgtgatctatgcgggttctcttgtgaacccgggattacttaaactgtgtaaagaaaagtgcgagatatataatagtgcaaagatgacattggaagaagtgttagaagtgatggtgaagggccatggggacggaaaagaaatcgtacgtctgcatacaggagatccttgcctttatggtgcgatccgtgagcagatggacgagctgaagaaacttgagataccatatgaagattgtccgggtgtcagttcattttgcggagctgcggcagcactggaagcagagtatacattgccggggatctctcagtctgtcgtgatcacgagaatggcgggaaggacaccagtgccggagaaagaatctgttagaagctttgcggcacatcaggcaacgatggtacttttcttgagtacagggcttttgaaagagctttcagcagaattgatcgaaggcggatacaacgaagatacaccggcagcgattgtctataaggcaacctggccggatcagaaagtacttcgctgcacagtaggaacgctggagcagactgcacgcgaggcggatgtcaccaagacagcgctgatcgtagtcggagaagtgcttgacgggacttatgagagatcaaagctttatgatccgacatttacgacagaattcagacaagcatcctgttctaagaaggaattaggacaaaccggagagaatcaaagcacagagatgagacaggaagcagagggacagagcaaatgagtacagtatatgtagtaggactcggaccgggagcagaagagcagatgacagtgcgtgcacagaaagtattggagcattgccctgttttgattggttataatgtttatattgatcttgtgaaagagcagtttcctgataagatatttttgagcactccgatgcggaaagaaccggaacgctgcagaatggcttttgaagaagcagaaaaaggtcaggacgttgcaatgatctgtagcggagacgccggagtctatggaatggcaggattgatctttgaaatcggaaaagaatatcctgagattcagatagaagttgttccgggaattacagcggcatcaggaggtgcagctgttcttggagcgccgctcatgcatgatttcgcagtgatcagcttaagtgatcttctgacgccgtgggagacgattgagaagcgtctacatgcggcaggaatggctgattttgtcatctgcctttacaatccgtcaagtaagaagcgcgcagattatctgcagaaagcctgtgatatactgcttcagtacagagatgtgggaaatatctgcggttatgtgaagaatatcggacgtgaaggagaaacttatcagattctgtcattgaaagaacttagagatacgaaggtagatatgtttacaaccgtgtttattggaaattcaagaacgatggaactgaatgggcggatggtaacgccgagggggtataaactttaaatgaaatcacagcaaattatacttgcgggaataggaatgggatctggtgatgtaatcacagaagaagtcagacaattgatagaagaagcggattgtctgatcggagcagaacgaatgattacgagtgcacagaagattcgtagcatgaatggattaagtatgcgtcagtgtgagagaaacaacaggaatgaaggagtctttattaaggaatatcgtacagaagagattgtatcctatataaaagagcacaaagaacatagtaaaataggaattcttctttcgggagatacaggattttatagtggagcgaaaaaactgaaagaacgattgacggaagtgtgttctgaccaaataaaaatttatcctgggatttcctcactttcttatcttgcatcaaaagtcggtgtttcatgggaagatgcaaaaatcctgagtcttcatggaaaagacatgaattttgtacagacgattcacagacattcgaagacttttctgcttcttgggggaaaagacacggggcgtcatttctatgagacattactagagtatggcttaggggatgtgcaggttcatgtgggatgtcagatgtcttatgaggaagaaaagatactttcgggcaaattgtacgagatgaaggcagaagattttgaaggactttgtgcagttcttgtagaaaatccatcgtattgtaaggcagccggtatgcatctgaaagatgaagaatttctccgaggaaaggtgccaatgacgaagtcggaagtgcgttctgtcagtatagcagagcttgaattaaccgaggatgcaattgtgtatgatatcggcgccggaacaggttctgtttctattgaaattgcacgtgcaggtgagcagattcgtgtatatgcaattgaaaagaatccggaaggtgttgaactgatcgatcagaatcggaagaaatttaggacagacggagtgcgaatcaaagaagggcttgcgccacaggcattagaggaactggaaacaccgacacatgcatttatcggcgggagttcgggaaacttacgagagattgtccaattacttcagaggaaaaatccggatgtgcgaatcgtgattaatgcaatttcacttgagaccgtaagtgaagtgatggggcttgtggacgaaggggttctcccagatgcggagattctacaggtgagtgcagcaagatcaaaggttcttggaagatatcatatgatgatgggacagaatccggtttatattatttccgcaggtggaagaaagtctggacaggtataagataagagaaaaggaaacaaacggacaggagaatcatgagaaaaatgaaagagaatgcttgcaataataaaaatcagaaaaaaaatccagggtttttgttgtctgctgtttccagtaatagtggaaagacagctgcagcctgtggcctgatgtctgcgtttaagcaagagggaaagcgtgtatgtgcgtgtaaatgcggcccggattatatagatccaatgttccacagggaggttcttggcgttgattctaagaatctggacctgttcttctcggaagaagacattttgaaagagggatacctaaagcatacgaaaaatgcggatattactataaccgaaggcgttatggggttctatgacggaatgtcacttgattctgtaaaaggaagttcttatgatgtcgcacagacgctaggattgccagtgatccttgtgattaatgcgagaggtgcagcaatgacacttgtagctacggtgaaaggaattgttgaatttcgtccggatagcaatattcgtggaattctcttaaacagagtatccgcaatgctatatccaagattaaaagaaatgttggagaatgaactggcgagaatcgggcatgacgagattaaaattgtcggttacatgccggaaaatgaagtgttccatctggaaagccgtcatctgggacttgtaacaccgcaggaaatggaaaatctgcaggagaaggtaagacaggcgggagaaattctggcaaaaacagtggatcttgaattgctcgaacagattgccggtgaagcagcagtatggaaaacagaagttattgaagaatcggagaaggttggaaatttaaaaagtaagaacgatccagttcgaatcgcagtggcgcgtgacgaagctttctgtttttattacaaagataaccttgaactattagaaagccttgactgtgaagtggtagaattcagtccgcttcatgataaaaaacttcctgaaaatgtgaaaggaattcttctcggtggcggttatcctgaactgtatggaaaagaattgtcagaaaatcagagcatgcttgaatcaataagaaaagcattggatgataagattccatgtctggcagagtgtggcggatttatgtatcttcatgaagaaatgaaggatgcagatggaaatgtttggaaattagtagggcgaatccatggaaaaacatttccgacaggtaaactggttcgatttggatatgtgaatttacagaggaatcttgatgaggatcagatttctgagcttaaagaacggatgagtatagcggacagctggattcttccgggggagaacatccgtgcacacgagtttcattactgggatagcacagacagtgggaatgactgtcttgctgtcaagccagatggaaagagaagatgggaatgcatgcatctggaagagaatctcgtggcgggatatccgcatttgtattatccatcttgtaaagaatttgcggagcgttttgtagaaaaatgcagaagcggttacagagaatagaacaaagagaaacagcaacagatgtcgttataataacatctgctgctgtttttttaggctctatgaaatatccagatcaatcggttcgtccaaatgttcggaaacatattttccatttttcttccgctgcctgacgcactcagtcagaagatattcaatctgaccgtttacggaacgaaaatcatcttctgcccaggctgcgattgcgtcatacagtttagcggagagacggagaggaacctgcttctttttattatctttttcagccatctctagtacagacttccggaattaatgatcggctgtgtgtcatggtttccacacagaactacgagcaaattggataccatagcagccttacgttcttcatccagttctaccacttctttttcacttaattgatccagagccatttcaaccatgccgactgctccgtctacaatcatctttcttgcatcgatgatagcggaagcctgctgacgctggagcatgacagcagcgatttccggtgcataagcaagatatgtgattcttgcttcgatgatctccagccctgcgtctgtcactttcgtctggatctcttcacggattcgcgctgcaacaatctcactggagccacggagacttccctcatcagcctttccgtcaccggttgtatcgacatcaggagcagtgtcatatggatagatgcggacaatattacgaagagcaccatcacactgaagtgagagatattctttgtaattatcaacattaaagacagctttcgcagtatctacaacacgccatgttacggcaataccaatctcaatcggatttccgagacagtcattgatcttctgacgggagttgttcagtgtcataaccttgagagaaatctttttgcttgaagactcttcagtggttcctgttgtagaaacacccaggagactggaaagatttgctcccttcttggaattgttatcaacatctccactctgactcaactttgtcttggaagcagggtttacactggtacagaatggattgacaaaatagaatccggcttctttcagtgtaccgatatagtttccaaaaagtgtaagaaccagagcttcctgtggtttcagcaccttcaatccaagaaatggaacccatccgatgcacagccagataatgctgacaaccagtccagcgataaccggtggagctgagaattcatgttccagtgcgattgcggacagaacgcatcctgctattgcaatcagatagagcagacaaaatagtaaaagcattcccattccatttttcttatttgataatattttttcattcatagtgattcctcctctggaaataaaatgaaatttatttgatatcataatgatatcactttttagaaaagaagtcaacaagaacaaagaatgtgccttggcacattcttgcgcctgcggcggtcgcttgcgacacctaccttgtacgtcgcagtgcacatcctgagcggagcgttttttatatattaggaaaggactttcctaatatataaaaaagctgtgaaagataagcaatttcatctttcacagcttctgttcacatatttattctatcaatcccagaattttggaatacaagaacaatcttacagctgaggacctgcagcaacaagtgctttaccagcttcatttccttcgtatttaacgaagttcttgatgaatctctgagcaaggtcttttgccttaacatcccactcagcagcgtcagcgtatgtgtcacgaggatcaaggattcctgtgtcaacaccctcaagctctgtaggtacttcaaagttgaagtatgggattgtctttgtaggagctttgttgattgctccgttaaggatagcgtcgatgattccacgagtatctttaatggagatacgttttcctgttccgttccatcctgtgttaacaaggtaagccttagctccgctaacttccattttcttaacaagttcctctgcatattttgtaggatgcagttcaaggaatgcctgtccgaagcaagctgagaatgttggtgtaggctctgtaattccacgctctgtaccagcaagttttgctgtaaatccagacaggaagtagtactgtgtctgatcctctgtcaggatagataccggaggaagtactccgaaagcgtctgcagacaggaagattacattcttagctgccggtgcagaagatactggacgaacgatgttcttaatgtggttgatcgggtaagatacacgagtgttctctgttacgctcttgtcggcaaagtcgatctttccgttctcatcaagtgtaacgttctcaagaagagcgtcacgaacgattgcgttgtagatgtctggctcagactctttgtcaaggttgataaccttagcgtagcatccaccctcgaagttgaatactccgttgtcatcccaaccgtgctcgtcatcaccgatgaggagtctcttaggatctgtggaaagtgttgtcttacctgttcctgaaagaccgaagaagattgctgtgttctctccgttgaggtctgtgttagctgagcagtgcatggaagcaattcccttaagtggaaggaagtagttcatcatagagaacatacctttcttcatctctccgccgtaccatgtgttaacgataacctgctctttgcttgtgatgttgaaaagtacagctgtctcagagttaagtccgagctctttgtagttctcaactttagctttggaagcattgtaaacaacgaaatctggctcgaagttctcaagttcttcctctgttggctgaatgaacatatttgttacgaaatgtgcctgccaagctacttcaacgataaaacggattgccatacgagtatctttattagcaccgcagaatgcatctacaacgaaaagtctcttgttagagagctctttgattgcgatatctttaacagctgcccaagcttcttctgtagctgggtggttgtcgttcttgtattcatcagatgtccaccaaactgtatctttggagttctcatccataacgatgaatttatctttaggagaacgtcctgtgtaaacacctgtcataacattgacagcaccgagttcactttcctgtcctttttcaaaaccttcaagttccggttttgtctcttcttcgaataataattcgtaggaagggttgtatacgacttctgttgttccagtaatgccatacttacttaaatcaatttttgccatcttacatatacctctttctttctagtgatagaataaaatgctgctcatgcaagcttttcatatccttttttaattatacatattatgtgaagaaaatcaataaaaatcccgtaaattttttaacaaagaactgagaaaaatgaaagatttcatattaaaaatgcaagaagaaaaaagaaaaatgtcaaataatgaaaaattacaaggaaaatatgacagattccgttgcttttttatatatcagaatgaaaaaaattatgataaaataggagaataatgccagaaaatgcgaaaaaactggcttgtgaagttagaaagacaaactatagatcagaagaaaataataagaaaagcagatataacaatggtagatgatgaaagaaaaacgacaaaaaatgaaaagatgtcgatgaaagaaaatgaaagattgttgattgaaaaattcaaaatgataaaaccggtggagaaatcctatgaagaacaggcaaaaagacgatggaaaacagttgcaaaaccactgttcagcttaggaaaactggaagatgctgtgatccggatggctggaattcgaagaaaagcggattttgagattaaaaagaaaggcttgctgatcttttgtgcggataatggagttgtatcagagggagtgacccagaccgggcaggaagtgacagcaatcgttgcggacaattttacaaaatgtgcgacgagcgtatgtattatggcagagaccgccggagcggatttatttccaatcgatattggaatggtgacagatgtttcgtcggtgacagatctgaaagacaaagtaatgtacggaacaaagaatatggcgatggaacctgcaatgtcaagagaacaggctgcacaagccgttcttattggcatacgaaaggtcaaagagctggcagaacaagggtatgatctgatcgcaaccggtgagatggggattggaaatacaacgaccagcagtgctgttgtgtccgttctgcttgatgaaagtgtggaaaatgtgacagggagaggcgcaggccttagttcagaagggctgaatagaaagattcgtgcaattaagagagcaattgaaaagcatcagccggacaaggaagatgttttagatgtcttatccaaagtcggagggcttgatattgccggaatgacaggtgcatttcttggcggtgcgatctatcatattccggttctgattgatgggttcatctcttctgcagcagcattgtgcgcagtgcgtatggttcctgagacggcggattatatcctggcatcacattgctccggagaaccggctgggcgaatggtcttagaagagctgaaacttccatatctgattgatgcgaagatgtctcttggagaaggcagtggtgcagttgcagcaattccacttcttgagatgggtgtgaatgtttatcggaagatgagtacctttgaagagattaaagtagagcagtatgaagaacttaagtgaagatgaggagtaagaaaaatgtggttattgaacgcaatgatcattgcaatcgctatgtattctaagattccgatgccgcgagtagactggaatgaaaaaaatatgagatatgcgatgtgctttttcccattggtcggagttataattggagtattggaaatagttgccgggaatctgatcacagtatggaagggagaaggaactttcttttatgcagttgtattgactttgattccggtttttataacaggagggattcatctggatggattcgcagatacaatggacgcaaaaagttcttatggagaccgggagaagaaactggagattctgaaggatcctcatacgggagcatttgcgatcatcagtctttgctgttacttccttttgtgtgcggggatttttagtgaaatgcgaacagaacgtttatttgcagcagcactcgtgttcgtgttttcacgttcattgagtggaatttctgttgtgacatttcaggcagcgaagaacagtgggctgcttcggacttttcaggatggtgcacagaagagaaatgtaaggatcgtattgatcctatggctagtggcagcaggagtcggattctatctgacagcaggagtatgcggagtggcagcagcagttgtcggacttgctgttttcttttattattatcagtttagcagaaaacagtttggaggtattacgggtgatcttgccggatacttcctgcagttatgtgaactgtttatgctggcagtgcttgcattattctagaaatgttattgcatataaatgttttatgatagatgctttattatagaaatgaaaatgaaataaaatagatttttttggagtgatttatggagcttattttgatccggcatttgaagacaccgggcaatgaaaagagacaatatattggaagtacagaggaagaactatcagaacaggaagtaatgaactttaaacagaaatataaaatagatagctatccacaggtacagcaagtgattgtcagcccaatgaagagatgtattcaaacggcagagttgatttatccagaggtgcagatacaacaggaatcgttgctgaaagaatgtgattttggtatctttgagggtaagacatatgaagaactgaaagatagagaagaatatcaggcatggctggattccggtggaacgattgcatttccggaaggggaggaacagaaggaattccgttcacgttgtgtgagaggcatgctctgtcaggtggatagattatgcaaagaaaatgtagaaagtgcagcttttgtcgttcatggaggaacgattatggcggtgttggaacaactggcggaagaccaaaaagatttttatcactggcaggtggaaaatggcggaggatatagaatgcttgttgacgaagaagagtggaagtccggcgttcacagattttatgaaattcaaaaactgggaggcgcgatagaatgaatgggaagatgataatcctggcatgtgttacaggatttctgttagattgcattttcggagatccggcctggatgtatcatccgatacgcgtgatcggaaacctgatcagtgtgttggaaaaaggattgcggaagttgttgtgcagtcggattcctgcatcagaacaaaagaagaaaaataaaagagaagttctgacaggaggaattttatggattctgacagtttcattatcctttcttgtaccggcggtactcttatttgctgcgggaaaggttcatccggcagtatggtttcttttggaaaccttctggtgttaccagatatttgcggcgcggtgtcttgtaggagaaagtaggaaggtttatcagaaattaaaagaagacgacttgcctggtgcaagaagagctgtatccatgattgtcggaagagacacagagaaccttacagcagaaggtgtgacgaaagctgcggtagagacagtggcggagaatacttccgacggcgtgacggctccacttttatttcttctgattggcggcgcaccgcttggattcttatacaaggcagtgaacacgatggattccatgcttggatacaaaaatgaaaaatatctgtatttcggaaggattccggcaaagatggatgatgtatttaattacattccagccaggttgacggcgtggtttatggttgttgcagcatttttgacggggatggatggagagaatgcgtggaagatttatctgcgtgataagagaaaacatgcaagtccgaattccgcccagtcagaggctgtctgcgcaggagcacttgatgtacagttagccggagatgcggtttatttcgggaaagtctataaaaaggattatattggtgatgcaatccgtaagattgaaccggaggatattcttcgtgccgggaaattaatgtatatgacaacgatactgatgatggttgtctttggaggtttattattatggatttattgattcgatttgcaaaaatggaagatgcagaagaacttctggcgctctatacaccgtatgtaacggatacagtgattacatttgaatatgaagttccgtcactggaagaattcaaagatcgaatgcgtcagacgatgaaaaagtacccgtatctggtcgcagaacagaatggcgagattcttggatatagctgtgcaggggcattcaaaggtcgtgcggcatatgactgggcagtggaaacaacaatttatataagaaaagaccggcagaaaaccggagttggtaaaaagctgtatgaggcactggagaaagtactgcacgctcagaacatttgcaatctatatgcatgcattggatatccagagattgaagataaatatctgacaaagaacagcgcacagttccatgcacatcttgggtaccgcatggtgggagaattctatcattgcggatacaaatttgaccgctggtataatatggtctggatggaaaagcttctggatccggagattaaacatccaaagccaatcaaatggatggaagagaatcgcgaggaactggaggcagtacttttagattaaaaatgacatacatagagaagtaggggtaagattcatggaatatgtacacggaggagacatttatacatatggtgatgtgctggatttttcagttaatgtaaatccttacggtccgtcagaagaagttcttgaagcggcaaaaagatcgatggatgaagtgagcctttatccggacagtcaatgcagacggctcagaaagagactggcagagaaaaaaagtctgccggaggaatatttctttttcggaaatggagcagcggagctgttcttttctgtcgttcttgcagaaaaaccagagaaagcacttcttccgattccggctttcgcagaatatgaacaggcacttcggacggtagactgcgaaattatttatcatgagttgaaaagagagaataactttgcattgacagaaagctttttggaagaactgacagaggatattgaccttgtatttttatgctccccatcgaatccgtcaggccaggtgattgaaccaaagctgatggaacagattcttacgcgatgtgaagaaaagaagatacgtcttgttttagacgagtgttttattgaatttctggaagaagcgcagaaatataccatggtgaaaaaggtgacagatcatgcgtgcctttttcttgtacaggcatttacgaagatgtatggaatcccgggattgagactgggctatgcaatgacttcggatggagaacttagagagcggatgcagcagatccgtcagccgtggagtgtgtcggttccggcgcaggcagcagggatagaagcgctgacagagagagaagaacaaagagttcagaaaatacgaaacaaaatcgtggaagaaaaaatgcgcatggaaaagaaaatgcgtgagtttgggattagatttattccaacaaaggcaaatttcttcttattatatagtgaaatcccattgtttgatcgactgttagaacaggggattttggttcgaaattgtgagaactatagagggttgaagaaaggctggtatcggattgcagtgcggacaaaagaggaaaatgatgttcttttacgggcactagaaacaatcctgtcaaagcagtgaaggaggcgaaaaatatggcgaaatcaattatgatacagggaacgatgtcaaatgtcggaaagagcgcactggcagcaggactttgccgtgttctgaaacaggatggatacaaagttgcacctttcaaatcccaaaatatggcactcaattcttttatcacaaaagaaggactggagatgggaagagcccaggtgatgcaggcagaagctgcagggattgaaccggaagcaataatgaatccaattttacttaagccgacgaacgatacaggctctcaggtgattatcaatggtaaaccaatcggagtgatggctgcaagagagtattaccgtcataagaaggaatatattccggcaattatggatgcatatcatgagttagaaaaaaagtatgatatcattgtaattgaaggggccggaagtccggcagaaatcaacctgaaaaaagatgatattgtaaatatgggaatggcaaagcttgcagatgcaccggtgcttcttgtcggagatattgatcgtggtggagtatttgcccagatcgccggaactgtaatgcttcttgaagaggatgaaaaagcgcggatcaaaggaacgatcattaataaattccgtggagatgtatccattctggaaccgggacttcgaatgttggaagataagacggatatccctgtaacgggagtagttccgtatttttatttagatctggatgaggaagacagcctgacggaacgatttcagaaaaaagagaagccgggactgattgatctggcagtgatccgattcccaaggatctctaattttactgacttagcacctctagaagcattggaagaggtgagcgtgcgttatgtttcatctccggctgagtttggcaatccggatgcggtgatccttccgggaacaaagaatacgatcagcgatcttctgtggatgcgtcagaacggactggaagcaagagttctgaaacacagcgcacagaacaaaccggtctttggaatctgcggcgggtatcagatgcttggaatagaaatctcagatccaacaggagaagagtacggaggaactgtacagggaatgggacttttggatacaaagactgtgttccgcccagagaaacatagaaccagagtacatggaacatttggcgagatgaaaggaatcctgaaagagatggcgggacttcctttcgaaggatatgagatccatatgggagagacgattcttgatgagcacgcatctgggcttgtaacaatagaaaatgattctgatacgctacaacaaggacatccggatggttcacagaaggaaaatgtctatggctgttatgtgcatggaatctttgattcaccggaaatgtcaggtgggtttctctccgctttattgaaagagaaaggctatgatccggagacggtacaggcagtagactggaagtcttataaggaagaacagtatgataagcttgcagatatcgttcgtgctagtctggatatgaaagaaatttatagaattattggattgtagagtttgtaatgagagaggggaaagtatggttacagatttaacgaaagaacatccgaataagacattatggcggttccttctgccaatgttgttcagcgtgatgttccagcagatttacaatatcgcagatagtatgattgcaggaagatttgcaggagaaaatgcgttggcagcagtcggcgcatcttatccgatcacaattattttcatggcatttgccgtgggaatgaatctgggggcatccgtagtcgtatcaagactgttcggagcggaagaccggggcggtgtgaagcgtgcggttacaacagcatttcttagttctatggtgctgggaatcatactgacattattcgggtatttctttaatcatcagatgatgagatggatccgcacaccacagaatattatggcagatggagttttatatttgaaaatttacattttcggaattatcttcctgatgctttataatgtgtgtaccggagtatttacagcactcggggattctaagacaccgttatattttctgctaggatcctcagctggaaatattattcttgattacatcttcgtagcaaaattccagtggggtgtgagcggtgttgcctgggcaacatttatcgcgcaaggtgtgtcagctgtgcttgcattagtaacacttctcggaagattgcagaaatttgccgggaaagaaaagcagccgtggtttgataagaaattatttgcacagatcatggcgattgcaattccaagcattcttcagcagagcgtattgagtgtaggaaatcttttcgtgcagggaattgtaaatcaattcggttcagcagttgttgcgggatattcgggagcgatcaagctgaatacatttgccattaatatctttatgacacttggttcctgtctatccagttatacggcacagaatatcggcgcgggaaagaaagaacgaattccattgggattccgtaccggagtgaaattgtcagagcttacggcattaccgtttgttattctgtatttcattttcagtcgtcagatgatggggctattcttaggtgcggagagtgtagaggctatcagcgcaggaatggcatttttgaaaatagtatcgccgtggtattttatgattgtaattaagctgatgacagatggaattatccgaggctccggagcgatggtttattttgtggttgcaacagttccggatcttattttgagaatcggatttgcattgattttgacaaaaagttttggaagtaccgggatctggatggcatggccatttggttggatcgtagcgaccacattaacattgatcttttatagaaagttgggatataagaatgataaaagcagtgatttttgatatggatggggttttgatcaatacagaaccgcttcattatcaatgttgggtagaaatttttaaagaacgatatggaattgatttggattatgaggtatataagccatgcatcggatctacaagactccatttcatgaatctgatcaaagaaaattatggaatcacatttgaaaatcttgaagttatgaatcagattatgaaagaaaagaaggatgaaattattgcaagagacggatttcctgagatgccgggagttgggcagatgctttgctgtctgaaagatgcggggtatcgcctggccgtggcctcttcttctccaaaacctgtaatcacagagacgctggaaacgctggatctgatgaaatatttcgatgtcgtgacaagtggagatgaagtgaagaatccaaagccggcaccggatacatttctctttgcagcgaaacagctgggcgtaccggtagaggagtgtattgtaatcgaagattcaacgaatggaggaaaggctgctaaggcggctaagatgccatgtatctggatgcataatccggattccggagaccaggagataccggatgcagtgctcgagattacggcctggacaaaggagaatatagaaaaaatcatgaagcttttacattttggtcaagaaaaagtgtaaaaataaatgagcgatataaaatttttttgagtagaatacttaaaaatagtagacctggaagtattattaggatgtgattgaatgaaaaaactgaaatttatatttggcaagcttagtgttctctattacattttgtttttgctcgtgacctgtgtactttgcaagtacggaagcatcagacagctgaagtttgcatttttggctttaggtatccttctggtactcagtctttgtatctggatcggttgcctgatagcagaaaaggaaaccccttttaaaatgaaaggcgcactcaggaaaacagtgtttggtacagaacttttgattctacttgtagttacggttggatgtatttcttatatcgtatatactgcgattccttataatggcgcattgtcctggaaggtagacagcctgtttaagacaaagaaaatagagtatgaacataacaatttcttccgtgatggcgcagaagggctgataaaagatatcaataagaaattgaaacttccggacgagttatatatcacagatagttttgagatgtcttttgataaagacggaacgataacccgtgtatcagcatatctttatggacagaatgaaaagggaaaagacaagacctatctgattgattatgatatcgataaaagtgataagattgttgtgcagatcgcaggttatgcaaatgcagattatgatgatgacaagaaattagaccctatgtttaccattctggaaaaatcagattgtaagatgcaggtggcacaatggaatctgaattatgcatttgcagataatccgccggaatatgagattctgtattatggaaaacgctccttcgcttcttcggaaggtcttgtttatcttccgggagatgtggatggtgacggagcagtcagcggtatgactgattttacagcgctggatagcggcggagaagcacttggatatgaagtgtctctgtatcttccgcaggatgaatctgtgacgccggtgcgttatatgatggaaccagaatatatcagtcctgatacaattagtcagaatgagcaggcagagaaagattcgcaggcaaaagaacagggaaaagagaataatacctggacggttgatacggacggaagtggtgttgtccgattcttcttaaacgaacagaaaggctggaaactttcagttgttgatgcggctcttggaacacgttattacaaactgaaaactacgtcagatggtgggtataactggacaacagtaaatgaagacccattcgacggaaatggcggagcaggagaagggatacaattcttcgacgaacagtttggcttcatcggtctgagcggggcatcacagacacattcatctatttatgttacaaaagacggtggaaagacactgaaggagatagagcttccgatggatactgtgacagaatacccgccgcatatgcaggaatatggcctcacgcttgcagattatcagtatctggaaatgccacagcaggatggagagaattacacgatccatgtaatgagccaaagtggcgagatggaaggtcttgtgttcacatcagaagatcagggtgagaactggagttttaccggagtgtttgatgaaaataacttatcataaaaactaataaccttaccctaaaagacgaattcattatgaaaaatgagttcgtctttttgttgttagggcaaagccctgtttctggacgggtggtcctgattttttcactcggtatatggaacgggaagaaagactattgtttgatattgatctccgtagtcatctttaaaagctctaaatttcattgggataattctaccagattctgtcaaaaaatcatatgagaaaaaatgatgcagcggttgcttcttattgttagctaaacttaagagaacagcctgcttaactccttcaagatctttaccaagtatagcgcgaattgcaagatttgtatcgtcaatcgtttcttttccattaatgaaaccttcttctttaatcgtgtaatctgcgtctatatagcgtaatttgtttttcatgttaatctcctttaaatttagtaaaggataggggggatttccctaatccatcaaataatctttacgttcatcttcatccatgttacatgtcatctctacgataatctcccaatattcatcatcggttagatcatcatatgtttgttcttcaaagtttttcataaaaaatctcctttcatttaatatacatctattatataattgattaggatataatttgtccgattttcattcaaatatgtaaggagaaagtaaaatggctgaatataaaaagtatacagactatgaattaattaatgccttgaaaaatttagggggaacgaaagagaatccgaatactgcattagaagtattcgaatatttgagtaaagagataaaatataataatgaaaagcaaaaaaatagtgcatgtcgtaaagttagaagacatatgagagaacttataggaaaatcggatgatgaaataaataaatatattgaaaatgattatggaatgaagtcgtatgaattctatagtattggttttgttaaaaaacaaaagaaaattacaggctattggtatatggggaagcaatgtgacgataatgtgctagcaaggtacttatcagatgttattatatactcaaaagtaattaatccagaattcaaaaaggattatcatgatcgtctatgtgatatatttggaaaaggaaacgtgggagaacctggtgaatttgagaaagaaataatttcattacgaccatatgcacctaaggttctactagatggcggaggagtagatattttaaagaatgttctggaaattgaatctgcaataaaattaaataaaaaaataagctttaaattatgtgtatatagagttgtaactaataatgacggaagaaaaatacaattagatgttccagaaaggacaagaactgtctcaccgtatcagattatgatgagcaacggacgctattatctgatagcaacggatgatgaaaatgaaaaagtaaagtattatcgcatagatttgatgtttggaattgaaaagctagatgaaaaacgaaaatcggtggctgaaaaaaaatggggaaacccaagtaaatatatggtatctaatccttatttgtatagtggagaaactgaagatataattattggatttcaagagcaacagataactcagattgtagattggtttggaacagaagaaaataatctttatgaactaagtgacgaatactcaattataggagtaaacaatgatcaaattattatgcaaaaaattaagttttttggagttaatgtttgggctttttcattttggataatgcagtatttggattgtgctgaggttcttgaaggagataaacttataaaaataattcaagagcgaattaaatgggcaaatagttggttacttgaaattgaagaataacagggaggatataaagaatgaatatcattacatggaatgtgaatagatttgacggaacgttggattggtataacactaattatgatcttgaagaagaaggaagaaagttttttgccaaaaaaatataccaaaaattagaactatgtcttgaaggcgaagatgatattgctattttacaagaatttccctatcgtgaattaaaaaaagatggtgatgttatattcgaagcgtttaaaaatatatttactgataagttcatagtacatacgtggtataacaatgcagaaaaaaataatgttaataaaacagttttaaatttaacagttgctatagcaaaaaacagcagtgcttgggcgttaaattctcttgaagataggataataaactacgggaaagaaaataataaatacaattatataaatagatatgttgaattacataataatagaataaatataaacctttttgggtgtcattttaatactaagaatgagatgtggaagggaaatgaaaatgaaaatatattaaaagaatttgacatattattaggagatttcaatattagtgaagaaaaaacaaaaaaaactatttgtgatgaattaagagaaacgcatcattcaatgataaataccgatatcgtcacacaaaatcaatgctcaacatcaatagataaaatatatataaaaaaagatttaaatgtgttaaccaatagtacaacagttttagattatatatattttaatgaaagggaaaaaaggtatattcgattctctgatcacaatctgtgtatggtttcacttgctaccgcatctctattcacaaattaaaattcttataaaaagcgattatcgaaatgatagtcgttttttattttactttttcaaaagacataaaatgtccttatgaactgtataataagaattcaggagtgaaatatggaaaactggttagaagtttcttttttggtgccaggagactagtatggagattttaaagatatttgtcgtttgaaaaatacaaatccgtcatatgaattgaatcgatatatccaagaagttattcaaaaggatcgggaacattttgatggatttcgaatatcatatgcagctctttgtgtgtcagaagagagaaggaaggtgcttgcttataaaggttgggagaaaacaagacaacaaaagttagcagatgcaattatagaaaacgttcccgacctcataattatggaggattacattcaggagaaagcggctcctttttacgaatgtttaaaaaaacaattaccaaaaatactttgaagaaacagtcaataaatttgcaatttggattcatacaaagaagattaagccacttgacactgattttgtgacatttgaagcagaaaatggtgatgaaaaactatatgtttttccaataccgtatataagcgataacactattgaaaaaaacactaaaatttttgatcaagtatgtaaaaaagaaaagcgcaatggtttagtgataggtcattatttatccagtgaacgaaaaagagttcttattaaaactattaaacttagcaaaacattgaacagtataacgcgatatgatgtgaaattaaaagaactaggaataaccgatagagttatattattttgtaaaattattacaggaaatagcaagcagaataaataaggataaattatgtccttccattctatataatgggaaatataaaagggagggcggattagaaaatgaagaacttacaaaaagaaaaattaagaaagtgccttatgaaaaatgccagattgcttcaaatgtttataaaagataaaaaagacggatattttatgaaggaagattttcatttatttacgttactagagaatgaaatatttagatgggagttgcaaatcgctattgactgtgctacagaagggaaaattcatatgatgatgttcttacatccagtagtaattacaatgataacaaagcctgcatatattgagttcgcaaatacagcaaatttgtatttggcatcttgttgttgacctcataaattatcaaaatactgatttacttgcctgtctctgaattgacctgtatactgtcatcagcatacaaaaaggaaaaggtctcagagcaccctcctagcaagttgtgtactctgagaccctggtcactaaaccatggttattatatcagattattcacttgtcctcaaggaggattttggtgttttttgttgagagcagtgtgaccacccatatgtgccccatctgtcaggctacgcttcgttaccgggattcacgcccacgcatccgtagaaaggaaggcggtttaaaagatcagttgatcattcggcggttttattgtaagaactgccactcttatcataatgaacttccggattgtcttgttccgtacaagcattacgaaacagaagtgatctccggggtgctggatggcgttgtacagccggaagacttagattctgaagactacccgtcctgcgctaccatgctccgctggctgcaatggttctgcgaaaatcttgaacgtatcaacggatatttaaggacgatcagggagttcctgctgggttataacgaagagaggatttcccttggttcactgctcgattctttcagaaaccaatatcaaaactggttagaaatcatcttgcgtcagatttacaacagcgggggatttttagtcccgatctgctggtaaggcttatgcacctactttgcatcgtctgtcgcggtaccaacgggtatagtggtctcaaaaggaggtcactattttatgaatacaagaataaacaaacaacaatggcaggaagaagaagccctcaggcgtttccaattgatttctccgcttctccaggctgatctggatgatgcaaaacggatccagctgcgcaaaaagattgcagaggagaatcatatatcggtccgttccctttaccgttatgaaaaagcgttttcggaaaggcagtttacagggctaaagccggctgaccgggagaaacaccgctcacaaaaactccctgaaaactttgagtttctgttggagcaggcaatccagctacgcaaggaggttcccgagcggtcggttgcccagatcatctacatcctggaaacggaagggcttgcagcacccggtgctttaaagcgttctactttggaacgccatatctacaaggccggttacggccaaaagcagatgcagatgtaccaggatgcaaggaacagttcttccaaacgtttctgcaaaccacaccgcatgatgctgatccaggcggatatcaagtatggtcccaagcttccgattggaagaaatggagccaaggtacagacttacctgtcctcggcaatcgatgaccactccagataccttttatcttcccggttctatgataatcaggaagaagcaatcattgaagatacgttccatcaggcggtttcccggtatggaaccttcgatgcctgttactttgataatgggacacagtatatcgcaaaacagatccggtcttcccttgcaaggttgggcatccgtgtgatgtatgcaaaaccaagatccggtaaaagcaaagggaagatcgagaagttccatcaggtagtagatgcttttatccgggaatcaaagctgaaaaacatcaaaacactggaggaactgaaccgcctatgggccatctatctggatgagtattaccacaagaaaaagcatgatggcatcgcagaatactatgaaagccttggcgctgccgttccggaagaagggatctcaccgcttcaggaatggaaccgggacagccgcccactgacttttttggatacagccgttgtagccgaagctttcctgcatcatgagcagaggaaagtggataaaggtgcctgtatcagtttccgcgggcaaaggtatgaaaccaagccggccttgatcgggtatacggtagaaatctcctatgatccggcaaatcctgagatcatcaccatttctcatcccggatttgaaccttttcaggcaatgcctgtaaagattggggcgtattgcgatagacacgctacgctcccagctgctatgcaggaacaaaaaccgacaacttcccgttttctggatgctttggaaacgaagcatacccagagcaggcgccaaatggcagatgcgatttcatttgcttcctacaggaaggaggtgaatggctaatgtatgaatcattctttggcatggaacataccccctttgtccgggacgtccctcccgaaaaactgtttgaatccaatgctttccgggaaactctcggtcgtctggcttatgtggcggaccgccagatgtttgctgttgtaacagctgattcagggtgtggaaagtcaacgcttatccgccggttttattcggaacttccaaaagaggattacatcatcctttatctgtcagactcaaaactgaccccaaggtggttctataaaggtttgctggatcagttggggctggaatcccgtttctaccgcggtgattcaaagcgtcagctgcaacaggagatcgaggtaatccggggcgtacagcgtaaaaaagttgtctgcatcctggatgaagcccacctgttagagaaggagacgctggaagaattccgctttttgctcaattaccggtttgattccatgagtcccatggcgcttgttttagttgggcagacagaactgtgggaaaataaactaaagctacagcggtatgccgccatccggcagcgcattgacatgtactgtacgctgcctcatcttgaccgttctgaaacagaacaatatatcgcaagccacatggattactccggatgcgggcaggaaatatttacaaccaaggcattggatgagatccataaggcatctgcaggaatcccacggatgatcaaccgtgtctgtgaaaaagctttgatgtatgcgtttcaaaatcagaaacgattgatcgatgattatatgatcaagttcgttgtggaacacgagatgcttgggatggtaacttcataaagcaggtaccgcctggaaacaggcggtattgcctaactgactggtgacagaaagttaagcaagtgagcgtcaactgatgtgagcaatctggtgacagctcatgaaatcactaacagcatctgccatgggaaggttttgggtaaatgaagataatgatttttgttatgaatgttacctaccagaattcctgttagaatatgaggaagagttggagagtcagctatttgataagccttttgcccattttagagattgtctatcaccgattatgaaaatgaaagatggtgaatggaacgcagaatatgcaataaaatacctaacagaattaagagaaaaggggtatgtcgacaatcaagaatataatttttggtagccaaagagaaaggagaaaaaaatgagaaaaagaattatggccataaatgccaatgatttttggggggaagaccggacatctgatgagtcacaagtatttcagtaacagagatggaagggaccacatagactggagatactgggctaagcaggtggataagaatcagacgtggaagggtttgaaagaatacatcttagataaaaaaccagatattctagtcattgaggagatgttaattagtttttatgaggaaattgattttgtatgtgagtttgctaaaatgggatactcatatgtaaaagggtgccttccggaaagaggtaattattcattgactatgacattctacaaggaaggaaatcctgaatatattaattcgccaggaaactacagggagaataggagcgttatttgtaaagacggaggtctcattatatgcggatgccattttccttgcgaatctgacgcagtgtttttggaatgtatgggcggttttgttatagatcaccttggagaagactttctgctgattggggatcttaatgcgaatgattcgaccaaaggaaataaacaaatggtcaacaggttattggatgaaggtgcagttgatctttggatagcagcaggcaatgatgagcatatgccaacagagcagcaatatcagggtagattggattatgcaattgcttccccttcacttgcaaaaaaggtagtgaatattgatattgatccgtttctgatgaacgagggcataactgatcatgcggcagttattgtggatatcgtaaactaacagtttactgacgaagtatttgcgttaagttattatgataaaaagatcatattggagtttttatggatataatgaatcggaaaaatgtaacacttattatgggaatcatgattaggaataccaagcttgttggaaattgcaaatgtatggatttattactattattcggatttgactataagtttaattacaacacttgaggaatgtgatatacctaagataccatcaatggcaaaaacggaaatgaagaaaattggttttgttataagcgcttaaaagaatacagaacttggagaagaagtgttatgagccgcagttataaacatacgccggtttataaaatcaccaaagccggaaacatgggaaagaaatatgcaaacagaagaatcagacgaaagacaaaggtaagcccagatgatattcaaatcggaaaatctaattattaccgcaaattaaatgaatcctgggatatatgtgattatcggttttggggagaacctatatggagagaagagtcttggctcaatctcaaagataatccggagctttggcaaaaatgctatagaagaaagtgaggacatagatgaaagaattaaaaaaactatttaactgctggatgtagaaggattttgagaaatatttatattgaaccttcaaatatgccacacccatcataacttcattaccagtgaggattgggtgcatggtcgaaagaggaacaaatgaacaaaaacagaggttatttcaagaggactcacctgaaaggtgatgatacacaaccgaaaccgataacgcatcaaaccgcatgggcactgttgcatgaacgcccggatatatgtgaaaagcatatatggaatcaaatcacaagcaagtagctaaaggcaagcttatttaccagtgaggtcttgtggctggtgaaagctagacaggtctacatcagtaaggatttctgcctacagtgaagaaatttatatgtagggtccatggaatatgagttttgccgacgggtaaaacgagagggatacttcgacaagatgttctgtgctgacagttgtagctgtaaaggtatcttcaaggtcttcgggtgaccgagggcatatttgagggttcaattgtatatcccaaaagattggcgtcgcatttatttggagggcaaaatggaaaagaattttattgatgaatttattccatcaaaagatacaagagcttatttgcatagcattcattatgaatttacggacttggaaaaagctacgattgttgcaaatcacattatgatttcctacgagaaaaaagtagagtggttaaatagttttaaggaaaaaatatctgatgacacattgaaagatagaatatcaaaggcattagttcagataaaaaaggataagaagtattacggaaagagtaatactgcattaggagcattgccttataatgagtcactttttgattttgtatttattccacataatttcaggcatggtgacattgtaagaagtctttatggtggctggaatacaacagagttttgcgagaaagtaggaatcatcctcagctattttgataaggattatgagttatataaaaatctaagaggggattattcagatgttcagatttgtgtagatattaaatttaacggagtagcttatcagggagagtttgaacatgaacacatcaatccaatatatattgagcgcatgacgttgaatgaaaaagatgaaagaatggcgtatctcaactatctaacgaatctttacagtaaaaagaatattaggatggatgcagataatcaacctgaatatgcaggcggttcagatgacttgttagaacagaaatatcttggggaatatgttccggttcaagatgatgtttccagtatttggtgtgtgcagacaggatacggatttgaaagtggagatattaattatattgcatctgagttctcaggaacaggtttaatctatcattttatgcataacggtgagagggatcatgttcatgaattcgaaagcgtgttggttgagattttgaaagatccggaacatgtagacattatgacagactatggtgaatactcagatcaggaagttcaaatggtgaaaggaataaaacgagcagcagcatttgtacaagcacatcacagacctatgaccgttgctgaattgtgcaaaaacagagcagagataaagaataaaggagaagatgattatggcaattcagttcaaggaaatcaggcaatatttggcaagaaacgttaggttatcaatatgttttgaggatggatattatcacgactatttgatgatttcggatattccggctgaaaaatataaggatttatatgtgtatggaataggaatgattgatgttgaattttctaaggatatatacacttctccccagaatttggatgatacgaatagttcaataaaaataaaggagtgcacttttgagccagcaattgagattgttcttcataaaataccacgtgatataaaaagaaaagcagagggacttcttttgttcaaagatatcaaaccgtacttacagataggtcgtaattttgctgttgttaacagagaggactggtcgtacaagttatatgaatggaaaagagatattcctgatgagtataatgataaatttgttttcggtataggtatggaggacaattttgacgaaaacgatcaggatattataaaggctctggaaaaaagagattatgattcttgcatgaataagagaatggtgattgttttgtcggatacagggaggacagatatagaaaatgtgaggggagcaatatgcagaaattaacctttgtgattggtgcaaatgcagcggggaaaacttattttatagaacatcacttggctaacgaaaaggctgttgttcttgatgtttatgattatcagcaaaaggtttacgatgaacatggtaacaaggagctgattacatttgaagaacagtttcgttgtcttaaaaaagcgaatgagaagcatcttcatgacattataaatgaactgaagcaaggtaataatgtaatagctgaacagaccttctttaaagcaaagcggcggatagcttatattgacgaaatacgcaatgaaatggatgtaaaaatagaagtgtatgtgatgcatccgagtaatgaacgttggattgagaacagcaagaaacgagaggatataaaaaacatagaagtatatgaaaatcaaaagaatcagatggaatttccgaatccagcggagggatttgacgcaatctttgaggtggtcgatgatgaaatcatacttcggatggatgatataaagccagaaattgtgaaacaggcaagacaggaactgacggaagaagatacacggattcgtagggaagatgaaagaaaacataaccaccgtcagctcatagagagcatgaacaccagaccattttggcattattgtgaagtatgcgtcaaataattattcagtaagaaaagaattagaatcctatggagattttatacgatgggcggatttcattgtaaaaagtagttctgaaatataagtatttgtgaggtgaacatgacaatgtttcaatttgaaaatcttaacgaaaaattatttaatcgtgtagtttgttttgcatattcttatccatctgggttaggcgggccaggtaccttgcttatgtatacagaagacggagaagaatacttagcagatcaacgaggtttggttgagtatgactggtttaaacttgatgaaatagttccgtttcgggatgaatcacgatttaaagaatactattggggaatcggtgtgcatctttatattcgaaatgatttatatgataaagtgatttctgccatggaaagcatagagaaacactatcatatgatgcctacggtaaataaggttatatggccgtttttagaagttccagaagaaaaggtgattcggattgtgtatgccggaacagaaaagataattgagcgagagaagaaggaacgagaggaaaaagaaaaggcatatgaaaaaataagactgacagagaatgatatgaaatggaatgatttatacattctgtttgaaagtgctaaagaccgatataaaccggaaggatgttacactactttatataggcgtaaggaaaatggaagtatcacaggatctatttggagtatattataccagcaggacggacagttatcttttgatgaagaatccggaaagtggggaatgggaatagaagcatataatattttttataaccagtatagtgatctaagtgaacctctatcgtatccaccaccggatggaggcgatgagccggtaacattttttaatccaggcagatttttctgttcatgccagacgctggaagaggcaaagaaacgtatagccgataagaataatgcaattggctggggctgttatacgaagaaagatattatagttcctatggaaaaagactggaaattttaagtttccaggcatgccttaaagaaattagataagatagatacattaagaaatgaataggaatgattttgattagaaatggagaaatatatgacttttgaattattagaagcaattattgtgaagaataagatcccgaagaatgtctgtttagtaaatgacagtgaaaatgatcttcgcacaacggatatgaatggtatttaatattgtgaaaagagagatgaaatctgtttcatggaaggagaatgcatacataaaccagatcatgcggaaaatgaggagtggaaattattgtggcctatttgtgatgaatgaaagacgaaagattattggatagaagcatataatattttttataaccagtatagtgatctaagtgaacctctatcgtatccaccaccggatggaggcgatgagccggtaacattttttaatccaggcagatttttctgttcatgccagacgctggaagaggcaaagaaacgtatagccgataagaataatgcaattggctggggctgttatacgaagaaagatattatagttcctatggaaaaagactggaaattttaagtttccaggcatgccttaaagaaattagataagatagatacattaagaaatgaataggaatgattttgattagaaatggagaaatatatgacttttgaattattagaagcaattattgtgaagaataagatcccgaagaatgtctgtttagtaaatgacagtgaaaatgatcttcgcacaacggatatgaatggtatttaatattgtgaaaagagagatgaaatctgtttcatggaaggagaatgcatacataaaccagatcatgcggaaaatgaggagtggaaattattgtggcctatttgtgatgaatgaaagacgaaagattattggaggatattaaatgaggtttgtagtatttcttgatattgatggtgtattaaacacaagaacaaccgttaaacgaacaccttatggatacacaggaatagacgatgcaagagttaaagtccttgcaaatgctattgaaaaatgtggaggcggtgacattgtactttcatctgattggaaagtgctggatagaaatcatgacgattacagatatcttgtatcaaaactcgagcagtgcggattgaaaatatcggatcatactactgataaagagcggaaaagggggcagggcataaaagagtatcttgaatcacatccggaaattgatgaattcgtaatactggatgatcaaaagtttgattttgaacattataaaaaaatatgggaaaggttattgattactaatggcattgagagagctgaatatgcttccaaaacacctgcggttgaggcaatacttttcagggattacattaaagcttattagacaatattacaatggtcggcgatgtgggggagttatcaatataaaatctgtttttgggataattcgttgaatctgatttgagctatattaaggatgcagatgactatttaacaatggagtattatggtggagacaaaggaaaaatcaatttttacatggatgtacaaactggcaatattttagaaaacgataaaaatagaaaagaagaaatatattatctccaatcaacgttgagagcctggtacagcgatatgagagaaaaactgttggaaggctatcaaaatggtagattcacaattttgccggaatgggatgagtagggataaaaaagaagaaaagcaaagtgtaaaaaggtggtcgagatgataaaagagattatagaaagaaatcgtgaagaggttgatgaaatcaaaaagatatataatgatttctatgaatctgcaaaagaagatgcggaaggaagaagattgtttaaaagcttgtatcaaaaggcaaatgattacatcgaatgcaaaagaaggtgggaatggttatcagatattgaggcatgcaaaataaatggtgaaagaagcggattacatgaaattcttatccaggcatttcaagagatgcttgaatatacagaaaaacaggggaagaagcattcgaaaaatacatttgactggaatagaaataatattgcagcttttgcagatgagttggtttccagaaaggaagatcttggggagcgtatacatattattgaagcactccagtgggcacaaaatcattctgaacagatcatagaagttattgagggagcagaggattattatgatgcgagagcgaaagtaatggaaacatttggttttgaccgtattcaggctcaaagtgtaacagagatgagagttagaacgttctgtgaaatagaaaaagagaaactatccggagagttacagaaatttagggggaaaatggaattgtttcaagaatgaaagaagggtgaactagatgaaatattatatcagtgatttgcatttgtttcatgaaaatgcaattaaatttgatcatcgtccatttgaatctgtacaggaaatgcatgaagtggtcctgaaaaattggaatgatcgagtgacgaatggtgattttgtatatttattaggtgatatgagtttgcgaggaaaaaatgaagatctgattgcttttgtggcgcgtctaaaaggaagaaaggtgctgattagaggcaaccatgatgatgtgtctgattacaggtatcaacagctatttacagaaatttgtgattataaagaaatttatgattcagttggaaaagaaaaatatggattggtattatctcattatccgattttttcttggaaaaacatgggacgtggaaaaattttgctgtatggacatacacatgaaagtgcagaagaccggttttatcaaagctgtctgaagcagatgcaggagaatgattgcagacacgtatatgataaaaaattacgggcatgtaatgtgggatgtatgctttcgtatatgaattatacaccacgcactttagaagaaattttggaaggagtagaaatggaaacgaaataaaaaatatttggcagctaatcggatttacttctttgggagtttgttgtcgtgggttcgactcccaccagaactttaaaggttctgtagctcagttggtagagcacagatttaatccgataatatcgccaaaaggatgccgacagctattgttacttacttcaaattaggtgtatttgagtggcaagatcagtcggcactgattaaagtatagtagaaagaggtgcgggcatgaaagaaatatacaaagactatttgtttgaaaagcatattcttgtcagtgatggagagacagaagaaaagcatgtttttgaaaccttgtttgcaatggcgcatttctttggcgtaaaaattacaaagggtagggagcttgtgcattgcggaatggtaaaagaactatcaaaaagatttggagaaaatgttccgaaaccgttttatagaggattccctcagagtgtccgaaatctttctacagaggaattattatttgatcagcttgcacattatttaatacgtacgggcttggcaattttgaagagccggggcagtctatgtttgaaaaagattttgaacgtgtggcttttcaggaagagacagaagtacaggaatttgtgatacaaacggaagaaaaagcagaagaaacggtacgagtgattgtgaaggatttattgtcaggttcgcgaccattgagtgagaggcagtatacgcttgtacttacatttattcgtgaccatcttgaaaatattccggatattgtatcaaagaatacctgtgtaagacttttaattgacacgaaaaatctttcactggcagacagtttgaatctgtcggatgttatgaaaatagtagatgaattaaactatcggtattatcacaatgataatccgaaaaaactgaatttaaaaaatcaggatagaaaattcttaacggcactattggacagaatgtttcgaggtgacaggtgtgatatttgtacatgttatgaaaagaagcagctatggaatgggttcttacatcatattcattatcggacgaaaaacgaagaggcggaaatatttgtacatgccatgagaacgaaaggcaatgagtctgtatacagtgagtttgaaaagctgatgcaggaaaacagatgtcagcaagcagcagaattattgcgggaaaagaaaggaatatctgcattgcttcgaaatatggattacattatcagccgtatggatcgagaagatgagcaaacattcctttcggaattcccagaggattgcagtacattgattttgctgcaattattgtttagatatgaaggagtgcagagaaaggacggacgtattttcaagtttacacagcataatctcatgaaggttcattatgaaacaccagaggagagtaagaaatgtcaaagcaggcttacagaagagcaggtaaaagaaattgggaaaatgattcgttcaaaactttctgagaaacttagaaatcgacttggaaaggtatatattgaaccttccatgaaaaattatacacttccattagcagaaaatacttcgcaaggaggattaggtgttctttctaaaggcagcaggatttcaatagatgaggggaaaaagctaagggcatttacctattgggagaaggtgaacgatattgatctttcggtatttgcacttacagaagatggtaatcggagagaattttcctggagaacgatgtcgagacaccagtcaggagcaattacctattctggtgatgaaacaagcggttatctgggaggttctgaatactttgatatcaatcttccggaattcaaggcacagtattctgaatatcgatatttgatttttgcgataacgtttattctgggaaaaactttaatgaatgcttttgtaaggcggggtatatgctgagagattgggatgatagtggacaagtatatgaacctaagacagtaaaatcagcatatcttatgaattgtgagagtacctttgcatatctgtttggaattgattttttcacgaatgaatttgtctggcttaatgtagcaaaaaatagtaaatcaagggtggttggagatacaaatctttcattcttgacagattattttcatcttacagatgttatgaatatgtatgatttcttttctatgatggcagaaaaaattgttgaagatcctatggaagcagatgtggtggtaacagatcacgaagtaaaatgtactgaagaagcccagataataagagaatatgatttcgaaaaaatccagatgttaatggaagatgcaaaataactgcggaggatgagtatgaaatttgaagatagagtacagttaaaattatcagatttgacagaagaattatttgagaaaattgttgcctatgggttttatgcgccatctggaatgggtggaccagggtgcgtgattatgattgctgaagatggtggatcttatcaattttacggacctgagttaaataatcttaactatcatagaaaatgggcttctttatttccagtgttaaatcagtgtgatacaagacaatggaagttagtagaaaatgtgtcatgtacaaagttatttgtgcgaaatgatatttatgatttgttcatggaaaatcttccaactccggagaagatgatttattatcgctgggaggactcttgcataaaagctacgttacttttacatgccaggacagaggatgaaatagaaaaaatcaattggagatatgaactgcgtacacctctttttgaaaaagatgatttagtggagttttatttcgataatggaaagaaaaagacaaaatgcaaaggagttattgtaggaacagatatttacagggtacatgggaaaattgaaacaattgaatatgacattttggtagaggattatgaaaactatagaaaaaagtgtttatataagcatattgatgagaagcatataaaagccacaccgggaaaattattgattatttctggattttcaggagttggaaaagggactgttatacaacaattattaacagaatatcctgaaaagtatgtcgtatctgtatcagctacaacaagaaagccaaggaaaggtgaagtggatggaaaatcttattattttaagaagcgagaagaattcgaagatttgataaacaagaatgaatttcttgaatttgctgagtatgccggagaatattatggaacacttaaaaaggatgtttacaagaattattttaagggaaaaaatgtaataattgagattgattcgcaaggagcgagacagattagagaaaaacaaaaaattcagtcggtacttttgattccaccatcatttgaagaattattacatcgattaaaaaatagaggcactgagagcaaagaatccattcacagaaggttaaagcaggcattggatgaaatagaacatattgaagaatatggagttctccttgtaaatgatagtgtagaaggtacggcttttgtgatcgatgctctttttcatccggttttaaaaaatgccagtggaatgaatgaacgagagctgaagatagcaagagagattcgggaagggattataaaatatttgtctgatgaggaaggcaaataattaaaagaggatagcttcagggaagtaaaacgtgaagaatttgagagttgataaagagatatatttgcgacttttccaggttcggtagaacgggaattgtgtatggaggaagtaagatgtttgagatagtcccatctcaatggatgaaaaaatgttttgaagaaattgattttgcatttacagattttcagaaggctaccttaatctggaatgcaccaggcagactcaggcaggaaatttttgatgccttggaggagttggcggaagatacgagagatgaaactctaagaagacaaattaacgaacggctgaattatgaaaaaaagatatttgaaacatttatccataatcagtccggaaaatatgtctatgttgtcgaaaatctggaatatgaaaatggtggatttttctctgattataatagagctttaaaatatgcaaaaaaatatatgcagatatatgaattgaaatgtcggataagtaagcagatgattgtagatacagatgcagacgaaattgtacgcaatccgttgcgaggaaatccaaatctgggttttgagacggaagaatactgcgcatatgacggtactgcggtagcatctgttactttaaatatgagtggagaaatagaacaattcaattcttacgagcttccagaagatgaaaaaattgtagatagctatcaagtggaacgattcgaatatcattttataaaaatgccttgtccattacaagctggtacgacggtaaaagatataaggaatggttcctattatgttctggcagggggagaagcggattggaatcggtatctgaatcgtatagaagagaaaaattggtatgttgatttttcagatatacagatgatttgttataaactaacagaatcaggaatctggtcacatgaacatattaatccattgtatcttgaagtggaatttccaacatatatggaagatgatccaaaaagacaggctttgagatatgcaacggaagcgttgggagactatttgagtcataaaagtaacggaaaagaattttgcccagacttggttctgaaatatgccagaaaatatgctgaagtatgtcggaaaaaaaacttatcagaaaatatgctggaagaagctaaaaagccagaagatattatgttgtagacgtcgggataaaaagaaaatttatcgaatatggagacggtatattatgagtcgaagctataaacatacaccagtttataaaggggataaagatcgatttgctaaaaagctggcaaatagaagaattcgtcgaagatcaaaattgaaccctaatgatggtcagagtggaaaatcaaaccattatcggaaagaaaatgaatcgtgggatatatgcgattaccgctattggggagagcctatctggagagaagaatcttgtcttaatcttagagattatccggaactgtggcaaaaatgttataggagaaaataagaaaatgcattatgtcattagtgatattcataatgattatcaaaagtttttttacggaggaaaagagtatgagatattatggttttgaattgggtacaaatacagaaaagattaaggaaaatgcaaaaatcgaactcagacactatggttacgacaatgtactcgaatctatcaactcgtatatgtatcagaatatgaagaataacaggacgtttttagtgtatcgggaagaggacaatctgatttctgcaatcttttctttcgatgaacagaagctaagttttcaaaatgtatatgaaggtattcttgaaatgttgcgagatacatttggaataaagcaggtaaaagtagagccatttgagataacgatgcatcagttcatggaatgttttcttgaatgtaaaagaagaagatgttttgattattctaatcggatcatagaatcgtcaaatttatggatctattattattcttgtatgaatgatacaagaccatttccttatgattttaaggagcgtattatttctgaacaggagtgtgagatttgcagtatctaccatcaggattttgtggaggaactgagaaatataaaggcgcatgcaaatctatctgaatacagtggaaatttggttcattatgtgatatccagtcgtagctttgaagcagcaggtgaaatgacagaagtacttgttcagaacttacgcaaagcgaatcgaatcaacagcagaagaatggaaatcgtcagtgaaatagaacctaatctgtttaggaaaaataaccatcttgaagaaattatcgaaaacagttatggcggagtgattgtcttagatttatctgaaaagtttgggtgtgatccggttgattatgtaatggcaagtcaatatctggagaaacttataaagaagtatcggaaccaatgcctgtttgtatttacatatgatatggatcatccgggatttgcctattatctcttgccacagttaaaaagatatatgatgacgattatgttaagagaaggaacaggggatagaaaagcagcggtcgattatatgcagaggttgattgaaaaatccgaatattcaaaatatgcaggacaggcacaggagttcatggcattgttcccaggacataagttttcgcagacagatgtattgagggcttacgagcagtttgaagcatggtgcctaaataaaaatatattgaaagcatatgattacaatttttcggaagatttcttgttggacagagatgaaaatgaagtatccgcttatgaaaagttaaataacatgattggcctgaaaattgtaaaagagcagattgataagattattacggcagatattgttgaaaaagaacgaaaaaaacgaaaaggaaatgattatcatacaagttcgatgcatatgatttttggcgggaatcctggaagtgcaaaaactacagttgcaaaactgtttgcaggaattacaaaagaaaaaggcattttaaaaagtggtgcatttgttgagcgtggaggaatggatctggatggaataggatgcgtaagtgctatcagagaagcatttctggcagcaagaggaggtgttctgttcatagatgaagcgtatgctatgaagagtgacacagctattacagtgctgcttcaggaaatggaaaatcaaagagaaaatgtgattgtcattcttgcaggatacaatgaaagaatgaaagcatttatgaagagaaatgaaggattgaaaagcagaataccatattggattgattttccagattacacaacagaggaacttacagatatttttaagctgatgatccgtgagaaggacttctgtgtaacagatgacgctataaaagaggcacattacatatttgaaaaagtaagaaatgttgatgattttgggaatggaagatatgtccgtaatctgatggaacgtgcggttagacaacagtcagtaaggctgctttcaacaagtaaaagcgcgagtgatattcaaaaggaagaactttttcagattacgaagacagatatccagatgctgggagagggagaaaagaaggaaagagaatcaggaacagccagaaaagaattagacgaaatggtgggattagcttctgttaaaacagtaatccataaagcgattgccaaacataagataaacaagctttgtatggagaaaggtcttcaaagggataaagcttctttacacatggtctttacaggaaatccgggaacagcaaagactacggtagccagattgtttgcagagattatgaaagatgagaaaatattatcaacaggcgtgtttgtagaggcagggcgtgcagatcttgtgggtgaacacgtaggagctacggcaccgttagttaagaaaaagtttaaagaagcacaaggaggagtgctatttattgatgaggcttattcactgtgtgacggctatgacaatggatttggcgatgaggcaatcaatacgatcgttcaggagatggaaaatcatagggataatgtgattgtaatctttgccggttatccggaaccaatgaaggcgtttcttgacagaaatccgggtatgcgttccagaattgcatttagcgtagaatttgatgattacactgttgaggaactttgtgagattacaaaattgatgctttcaagaaaacaaatgacaatcacagaggcaggaatgaaaaagttaaaaaagaatttcgagagcgtaaaagatagcagagactatggaaatggaagatttgcgagaaaaatgttggaagaagcagagatgaatctggcagaaagaatatgtcagatggacgaaacagaaattacaacagaagtgctgactatcatagaggaaagcgatattccagatgttccattggaagaaagaagacagataaagaagattggatttgcatgttaagtgataccggaaacggtaaaatttggagtgtgttaggggcttcttaggaatgaaaggggatgattgacatagctacttatgttgtttcagatattcatggagagtacgaattgtttatcagattgctggaggaaatctgcttgaaagagacggatacattatatgttctcggagatattctggacagaggttcgcatccgattcagattattctgaagcttatggaaatgccaaatgtggtatgtctgacaggaaatcatgagcttatggcgttagagtgtctggaattcttaatgcaggaaattacagagatttctatcggaaaagtcgatgaaaaaatgttggagaatcttatgacctggcagtacaatggcagcaagtcaatcattgatgagtttcggacattgagccgggaaatacaatatgaagtgattgagtttataaaagattttacaatctatgaagaactgacggctaatggaaaagaatatttactggttcatggcggattgggaaattattatccgggaaaagacatagaagaatattccataaaagaattaatctgggacagggctgagtatgatatccaatattttgaagatacatacgtggtaacaggacatacaccgacacaggggattatggaaaatccaagaccggggtatgtatataaaaagaatcatcatattgcgattgattgtggttgtaatcgaagaaatggacgtttggccgcagtttgtctggatacaggacgggaatattatgttgaaaaatcttgaaaataaggtgggaaaacgaaatgattgatttagaatatgcgaagaaagcttttgaaaactatttgaatgattatgaccaaaaaaatgaaaagataaagttgaagattgtgcatacttatggagtgatggaatgcagtaaaaaaattacagaagatatgaaactgtccgcagaagattgtgagctcgctcagattattggattgttgcatgatattggaagatttgaacaattaaaatgttacaacagttttgaaccgggaacgatggatcatgcagcattcggtgtgagaattttatttgaggagagactgattcggcgttttgtcgaagaaaataagtgggatgaaattataaaaacagcaataggacatcatagtgattactgcttaaaagaaattacgaatgagcgagagttgatgcatgctcaaatcatacgtgatgcagataaacttgacaattgcagagtaaaactcgaaacagcaattgaaactcttctgggagttacggcagaacaggtaggaatgtcggaaattacgccagaagttatgcaacaattcaaaaatcataaatcaattctattaaagacaagaaagacaaagatggattactggatatcttatcttgcatatttttatgatataaattttaaagcgacatatgaaagtataagagataaccattatgtggataaaattataggaaggattccgtatacaaatccaaatactggaaaacagatggaacaaataagaaacgaaatgaatctatatattcaaaacgctataaatgagaatggaaattacagataaatataattgagattttgaaggcaatttacaattttcaacatagcgaacagaagattaataatatatgtaaggtggtaggaaatggcttattacataacaggagattgtcatgcacattttgaaaagctaatttggttggcaagatttaataaaaaacttggaaaagaggatgtaatcatattattgggagatgtcggattgaattattttggagctgacaaggatcatgagaataaaaaaatacttgcggattttcctaattattttctgtgcgtgcatggaaatcatgaggaaagaccttatcatatacaaacttacagtacacaaatctggcgtggaggagaggtatattatgaaccggaatttccgaatatagtatttgcaaaagatggagaaatttatgattttgatggaaaaaaggcgattgcaatcggtggggcatacagtcgcgataaagaatatcgacttttaacaggccttccatggttccaggacgaacaaccagatgacaaagtaaaaagtcaagtagaaaatagattgaatgaagtagattggaaagtggattatgtgttttctcatacatgtccgttagtatatagaccgaatcggcggaatgaagaatgtcaagagaagatagatctgtcgacagaggaatggatggataaaattgcaaagaaattagattattcgcaatggtatttcggacattaccatgacaatattcaatatatagatgctcaactactgtatgaagaaatcaaagaattaggagaaccagattctgttcagaaagtaggaagaccaaggtacagagtaggagaaacggtgtattttacctatggaaaagaggacgcaagggaaggctacggaacggttgaatgggttgatgatcatggaacattgggacaagagaaggaagtttcttatgatattgtgggaattccatgtgaattaccgagagagaaaacgttgtttaagcatataagagaatcgaaaatacagagtattgatgagatggaaattgttagaattgagagggaggaaggataggtgcatttttatattacaggtgatacacatcggagctttgatcgtattgaagatttttgctatggatatgaaactacaacagaggatgtgatgattatcttaggggatgcagggattaattattggctggatctgtctgacaaagaattaaagggacggttatcaggaatggatattacatttttctgtgttcatgggaatcacgaagcacgaccatgtgaggcagcagaatatgaagaaaagatatggaatgaaggaattgtatatgtggaagaacagtatcccaatattttatttgctaaggatggagaaatttataatttcaatgggaaaaaagtgatgccgatcggtggagcatatagtattgataaatattataggatacgcaatggtctgccatggtttgagacggaacagccagacgaagcgataaagaaatatgtagaacagaaactggacaaagtgaactggcagttagatattgtcctttctcatacagttccgatagaatgtgagccggtatgggcatttattccaggactggatcagtcaactgtagataagtcaacggaaaaatggcttcaatatatttatgacaatctggaatttacagagtggtatgcaggacattatcatgtggaatgtgaagaaggtggagtccggattatgtttgaagagtatgatgagattatgtagggcgaaataatggaaaattatgtatatttgataggaataatatacccctatggagaacttagtattatggggatttatacagatgagaaactagtgatagaggcttatgataaacttataaacgaagatggaaggtgtacggctctggaatatccggaagaacctgaaatatataaaatcccactgaataaatttcttggagaaaaagtgccatgggctgagatgattgatggaaaattgtgcttttatgcagaagataatatagagaatcttacgatcgatcagattagatcacatgtgaaaagtacaagcttttaagcaataactatgatatggagagcgatgcgtaatgaattattatatcagtgatttacatttgcttcatgaaaattcgattaagtttgatgaaagaccatttgacagtctagatgaaatgcatgagacgatcaagaaacgatggaatagtaaaataacaaatggagacagggtatttattcttggagacataagttatagaggtaaaaatgaagatttgattgcttatatttctacattgaaaggacaaaaaatacttgtgaaaggaaatcatgatgatgtgtcggattatagatatcatcagctttttgcagaagtttgtgattataaagaagttcatgattcagctaatggaaagaattataatcttgttttaagccattatccaattttcagttggaaaaggatggggaaaggattcattttactatatggtcatacgcatgacagtaatgaggatgcttattatcaaagctgtttaatgaaaatggtggaaagtgattgtcaacatgtgtataaaacggaagttagagcaataaatgtaggatgcatgaaaccctggatgaattatgaaccgcgaacattgacagaattattgtcctatccacaatgaattagatgatagaagggagatggttttatggctacatatgttatttcggatattcatggacagtacaacatgtttatagaattactcgataagattgatctaaaagatacggatactttatacattttgggagacgtgcttgataggggcccgcatcctattaagacactaagaaagcttatggaaatgccaaatgcaatatgcctggtcggtaaccatgaatttatggcgatgaaatgtctggaatttttgatgaaagaaattacagataagtccatagaagagttagacaatgaaatgctggataatctggagacatggcaatataacggaagtagatcaacggttgatgagttcactcagatggattccgagtctaaaaaggatgtgattgattttataaaggaattcctgatatatgaagaggtgtcagtcaatgataaaaactatcttctggttcatggaggtttggggaattattctctagaaaaggatatagacgattattcacttcatgaattgatatggccgagagcagattataatatacagtatttttcagataaatatgttataacaggacatacgccgacacaagcaattagaaataatccaaatccaggatatatttatcggcgaaacaatcatatagcaattgattgtggtgctacttatccgggtggaagacttgctgctatatgtctggacacaggcgaagaatattattctgaacctaataaaatgggaagtgatgctattggcttatgatgaaaaaattatgtaatattttgggaggaaaacagaatgaacagggtggactgtattaaattaataaggtcatttattgatgaaaaattagatgggaatattgaaaattttttgaattatgatttagatcaactcgaaaatgatgaaaaatatgggggttttgatcctgataattctaagatagctaacgcaatctatgtggtactatggggagataaaattccagatttgaattacgatgcactgggaacaagctacaggggagacatacttaattctttcaacacattgatgggacgaagtacagaggatcaaacgaattttgttggaatccaaaagtataccgacaatccacaaattattgagatggcaaaggaatatcataaaaaatatcacacaattggtaatatgactatttggccaaataattcagtggaatactcggaaatctggaaagagtatgaagatgatgatacaagaaatgactttaaaggaaaatcttttacatttaatacaataagaagtcagagtccctggtatgattactttgatgcattcctggaaattataaaagaacagttaacagcaccgaagatttatttaaatggctcagcttattccgtagtatgcgagctgatgtatggaaaaacattggaaacacagttctttgaagattttttttatttgggtggaatggagaagtttgagaattttattcatacattttattatgaaaattatgtagatatggaaaatatggaaatacagcaaatattttcaccacatgcgtatcattggagaaattcttataagaaagaagaatatgaaaaatacgtcagttcttatattacaaaggcaacagaaatcattgaatatcgtggctcaaaaatgattgaagagttgaaaaaagcgttacagatacaggaaccagaaaaagaatcccctgcaacagaaaagaaaaaaagtaaagcagtgtcttatttaaaggaacttttgtcctgtgattttttaccgaagattttattgggaattgtatttatggttttatgtatttattctgcaggaagctttatacgctttttgattattggtggatataacattccggatgaagtgagggcactacgatcaccatatcatggaaaagaatggttatttaatagtttttatatagtaatgcttcttgcccctttttttatgtgcagggtatataaaaaagaaaataccggcttcaaaaaaattataatgagtttactggtcgttattcaagagattatgattatctttccgattattttatttgtgctgtggaagattttaatatgttgcagtaaatttgtaccaatccttttaaaggaagcttatggaatcttggaacttgtaaatgcggcaggagtattatatttaggaattcatacagcggtcgtggtaatttcgattattgtattggcgatagaagaggattatagagatttttcaaaatattggggaattttatggcttctgtttatatttgtatttccgttaatactcaaggttttgtcagttaagccgttagcaattctaattggaattgttgctgttggatttattatagtagtcttgatattgaatggatatgatgcggtaaaatatcgttgcccggcatgtaaaaaatttaatgggttaagttatgttagttcaaaattgcttcgagaagacgatatttctattcaagtccaaaatcaaataaaaaatgcagagggaaaggttattggaacacaagatcaatatattcctggaaaacggaaaatgtatgaagagacatataagtgtgcaaattgcggttatgtcaataaaaaattagtgactaaagatgtgaaattgctctgattaatcactaaaaacaacttacagaatctatactgatacagctctaacagtgtcatttaaacagacgggaaggatttaaaatgaaagggaaaataataggaattgtgattgtggtgatgcttgctataacgggagtagccggatacttcacatatcagaaagcagaagcagaagaaaaagcagacacagaaaaaatgaataaaatcaaggaaagcgagaatcagttttccaaaaccgaagagcatacagaagagaaaaaagtggctgaagaagaaaatgccagacaacctgcagaagatatcgttatagatgaggaaaatagaaaagatgaggctgctaaaacgcattatgaaaataagtatttttctattgatgttccagaagactggattgggtactgggatgtaatagaggaagagaattcattatatgttgaccagatattgtataggctaagttataaaccaccagtagaaaattatggaggtggtgctgagatatacatattggatatgagtgatacaagcgttccactgtctgtttatagagcaagtattccagattatgcagaagaggtaggggttgtatcttttgctgattatgatgtttttgtaatggaagtaggtggcggattcttctgggatggcggtgcaaaaattacactaaagtaatttgatgaattgttacattagtgatttatttttgttaacgtggaaatgtggaaagttattggcactacggctaatttgccgtacggcttatttattcaaaaaaacaaacgattttgccgtacggcatatttataagacggattattccaatccaaacttcatctttacagcatcgaccaggtaatctgccgtcccttccgtcccgagcatgctgctatctatcatgatctccttaaatctctgatcatttggcaggaatcccgcgtaatgcatatgataatgatctcttgcctcatcaaccgctcttatcatttttctggcatccgtttcgtccatcttcagatcattcacgcagtttttcacgcgttcttcgtatggagcataaatatagattcggagaagatttgtttcatctgccaatataaaatcggagcaacgtcctacgatgatgcaggattctctttctgcaaggaattttatgatattttcctgtgcctcgaaaagtttatcctgtaaatcatcagcctgtgttccgagtggatacatcatccgtcggaaactgttggaatgtacttttttctttgcgctttcctctatttcatcaatttttgatacagggagatttagtttcttggccgcttcctctacgatatccctgtcataaaattccacaccgagcttttcactcatgcgcatggcaattggtcgtccaagactgccaaattgtctggctattgtaacgatatatttttttttgctcatattttctccttccaggcagactgcattatgtttatatgcttttatatactgataaatctgtatgctatatttctgccaattacatattgatgtttcttgattatataacgaatcctaagatcaaaaatcctacgattgaaattcctgccccgatcagtacatacggaagctgtgatcctgcatgctcgaggttatctattccggctccatttgatgcaagaactgttgtatcgcagtagaagcatgcatggtttccgaatgcacatccggagaggatggctgccattacaagtacgatatttgctccaacactcgctccaagtggaagaagtaccggtgcaacaagtgtacatacgccccatgcatttgcaatcatgaatgcgagaagtcccacaatgataaatgtgatcatagggaaaacacttcctgccatgaaaggtttgcaaagatccacaaagaattctgtcatctgcatctcacttgcaatcttttggaatgtaagtgcggagataagcaagattatgattggtaacatatctgaaaacccttttacaaatgtatcccagaattctgagaatgtcatgatttttcctgcaatatataataccatagaaacaaggattgcaataatcgcagctactaccagatcaccggttgccactgctattccaacgagcacagcaagtggaataatgaaaaaccatacgcttcgtccttcgtcctcgccatattcagaagcaatattgtattttctactgacgtcgctatatgttttccctgttttggcaactcgctcgtatgcctttttcatgccaccaagctttggaaaccagcccatgcagaaaagaaatactattatgagagccacgattgggtaaacacaatatggaacagccatcaggtatgtcttcataaggcttccacctgcaagatcctttacacaatcctgctgtaagaaaatagctccaaaatatgctgcccatgatgaaaaaggaatcaatacacaaacaggagcacctgtactgtcaagcagatatgcaagtgactctcttggtactttctttttatcataagagcctttcattgctgttccgattgataacacattaagatagtcatcaacgaagatcagtattccgagaatgaatgtagcaaacaatgtttttctttccgtattacagatctttgtgacaatctttgtaaaaccaaagcttcctcttgatgctgtgagaagtgctacaagacttccaaaaagtccacatatcaatataacataggcctcatcacttattactccttcaagtgtgcttacccattttgtcaggaagtcttgtttccacaaaacaattgctcccaccatcgatcctgcgattagaaatgcttcgcatttttttgttgtgatcgcacctattacgattgccagtacgatcagcgttgcaattagtccataactcataattctatcttcctctctttccagatgtgatggttacttcaactgcttatgtgatttcacagttcaccgtcatatcttacttttctatgtaaactacaaaagggtcggaagattgtatctcttccggcccctttgcctttcgttgaaattatattatatttatcccccttgcacgtcaatgcataatgatatttttgcgatattttcgtttcttgcaaacaaatggatcactatatgcttgttttcataaactaaatagctacttgctcctgtatactttcagtatcacttactgataattcactcaagaaaataatagatcatcagtgcattgtatagctcctgactctggaatctgttcgcaaaactctttcctgtaagctgttctactctctgtaatctgtatttcacagtgttcttatgtgaaaacagtttatcagctgttctctgcagattacagtcacactcgaaataggcccacattgtctccatcaactgtgtatgagctttcttctcatactgtatgataggatcaagcacttcatccgcaaatcgctgcattggcgcagtattttcatacgacatcagcatacggtaaaatcccatctcatcatagaagatgatttcatttttcctgttaatatgctccaatacggagtttgttttagatgtctcatgaaagctcttctgtaatttggatatgctctcacatttttcacctatgttgagagtgtattcaattccgttcaggtcattttgcaaaaactcaccaaactgtttaaaaatttctattatcttcctgcgatcatctgtacagtttttcataaaacctatgatcctgtcgccatagcaggaaatgattgcaggataatcacattcagcaaaatattcttttagagtctgtgcatagtttcttatcttgtcatttgtaattccctgatttaattcattgcatgtctcttccgaactttttttacatagatgtaacacgaaaacctgttctaacattcccggatcatttcccatttgcttgcatttctgctcgatactggatgtattgatacagtttccaaaaataatttctgcaagtagactgtcctctatatcttttctgtcatccagatatgatatggcgtgtcccagttcctcaaaaaagtctaaaagtggcacattccaaggcatggtgaaaagcggaaaatcattattttctgctaaatctattaccttttcgttaatctgtgttacataattctcgcccatcaataaaagagcacacgacatgttaagttcaattgccttttttattgtttgatacagatcaaaattttttcgctgtgttaccggagcacttactattaaaagttcgttcccacgtacccatttctcaaaattaatattctctgccttataagaccagcgtatgcccttttccatgccacctgatccggctattacatttgcctgtgacattgtcgtaagtgatagaagatccttgcactgaaacattgttttcccaccttttatttcaacaggtcaatagctcctgttacctttgcaggaatttttttgaacaaaaattcaccgtgtctgacagaagcagtgattcctgctctctcacatattgcttcaaattctgattttgcatcaagcacgataaagtttgcaggcttattttcctcaattccgtagtgatctgtaatattcatggtcacagctccgttcgttgtcacaagatcaagaacattcgtaatctcttcaggtgacatcatctgtgccagatggattccgtgatcgagtatcatcatcatatttccatttccaagaggataccaaggatcagacatggaatcctgtgcaaaacagacattgattccgttgtcataaagttcctttactcttgtgattcctcgtctcttcggataggtatcctgacgtccttcaagatatacattctcagtaggacaggagatgaaattaatgcctgattttttgaaaagcttcatcatccggaatgcataactattatccgctgaaccaaaggaacatgtgtggctggctgtagttcttgcgcctataccttccataagtgccaatgcattcaacaactccaaaaagcggctctgcgtatcgtctgtctcatcacaatgtacatcgataagcttattgtatttgacagccagttcgattgtcttgtggattgatttttcaccgaactctcgagccagttcaaaatgaggtatcgcgccaacacagtcagcccccatcttaagcccttcctctaccagcttgtcaccgtccttgtatgcgtacattccttcctgaggaaatgcaacaatctgcagatcaagaatatcttttacttcatctcttacttcaagtgcagctttaagacctgtaaatgttggatctgtcacatcaatatgtgttcggatagcctgaacaccatgcagcatctcttttcttattccactgtaaatacgttccttcatctgtgcaacagtcatatttccttttgattcactccaacgctggattccttcaaaaagagttcccgatccgttttcctcaccaaggcttgctgtaaatacataatcaagatgcaaatgtggatctacatatggtggaaccaccagttgtccatttaaatccacttcctcacatcctacagtttcttcctgtggtatatctgctgcgattttcttgaaaattccatctttaactaagatagaaacacgttctttttgaccctttagccttacattcttaaataattttgaacctttcatactgtattcctcttttctcattaacagtaatgatttgaaataacatcattattgttaggttgctatttgttctttacgcacaaatcatagcattcggtcagaatacagtcaataaaatgcaaaatcaacgcttttattttattcttgcgtacaaaaaaagtcaattcaatttgtttgttacacacaaaataaaccggacagatgtaaaagcattatctcctgaaaaaacgatatcataaatatttttgcgagtttcctgtaaggagtacactgactcaaaatctcttgcaagtatatcgctgtagcgatatacttaatacataaggaggagctggtatgaaaaaaatattatatcatggatcagaattcttaattgaaaaaccagagttcgggaagggtgccagacacaatgattacggaagaggtttttattgtacagaaaatatagaattagcaagagagtgggcatgtgcaaagcaaaaaaatggatatgtgaatatttatgaattggacatggaagggttaaaagtattgaatctgaatgattcaaaataccacatattgaattggcttgctattcttgcagataatagaacgtattggcagaatggaagtattgcagaagaggcgaaaaaatacataaaagagcatttcctgatagatattacttcatatgatattattgtaggatatcgtgcagatgattcatacttttcgtttgcccaggattttgtttcgggagtaatttcgttggaaaaattatctgaggcgatgcggttaggtaaattgggcgagcagattgtattaaaaagtccgaaagcttttgagacgatttattttcagaattatgaaaatgtagatgcggaaatatattatatcaagaaagcggagcgcgagcgtgaagcaagacgagaatatagaagacgtaaaaaagaaagtgcagatattcatgagttattcatgctggacatcatgagggagggtatggaaaatggtgatacacgcttattcagatgattatcttacgtcagcccaacgaatattgggagatatgttggattttgcagtgaacacatatgatatggatattgataaattttttgaaatgtttctggtttcaaatgtgtcacggcaatttgaaattggaaatcctacttatgtagccggaaaaacagggtgtgagttagtcaaagaagtgattcgggattctgggttagtaatggaagagtacccagatgagatgtatttggataaatcaccagaatattggagtggctgggcattggcctattatcagtggtatcgaggaagaacattttcacgcatctacagggcggtatcaatgacggaagttcgaaatatgtatgaagtataccacgagatggatttggcacatttcgtggagcggttggatgaattatggaaccaacattatccggagacaaatctgaaacgaattcgtgatttggcgggactatcacagcgagaactggcagaactgtcaggagtatctgtgcggcagatacaactctttgagcaaagacagagagatatcaatcagaccagagcaattgatgtgttgcgattgagcagggcgcttggatgcaagaatgaagatttgttggaactatgaggatcaggctaaagcaaagaatcgtctaaagacagcgagatatgggaaagacctgtatctcgctgttaaaatagatgctcctgagttggtgttttaggaaattgtcttaaggactctttttagaattgaagtcagaacaggggcagttattgcagtaaaaatcattccaggagctgcgcttactactaaaggttgccaggcaacacccaagattgttgccaataccagtctggctgcaaacgttccggcaggaccagcaataatgagggccagtgggtccttttttaatactgttaagataagaccggctacaatacggtacaccattgcgataatgacattgtatatagtctgaagacctaatatcatcccaataatgttggcaatgatgccgatggtaagataatgtagaaatcctctgattcttccgatgcttatggctaatggggctgataattgaaattcagttcctggaatgggtgatgggattttaaataagcccgagatgaacagcagaacaacccacatgccgtccatagtcagatttttgacactaaaaaaatgattggataaaattctttcttttgattcttctgtagtattcatagttttcccatccttttgtttaaaatatttctgccatttcccattgagagagattaaaagcaaagctattgtatacaataagcaactaattgtcaaccattaaataaaaaaggttgacaattagttgcgagtaagtatatactttgcctaaagtatgcaagaaaaaaggagaatgcaatgggaaaagggatatttgtaaccggtacaggtacggatgttggtaaaacatacgttacaggattgattataaaaaagataaaagagaacgggatgactccaggctattttaaagctgctatgagtggaaatgaaagagaggaagatggaacgctgattcctggtgacgctttgtgggttaagaatgtatcaggaatctcccagtcagtagaggaaatgtgcccgtatatctatgagcatgcttattctccgcatctggcttcacgtctggaaggaaatcatgttgagatggcagttgttttggataattatagaaaagtaaaagagaaatacgactatataacagttgagggaagtggcggtattttatgtccgatctgttttgatgaggcacgtattgggttgacagatataatagatgagatggaacttgactgcattctggttgcagatgcaggacttggaacaatcaatagtgttgtactaacttatgaatatatgaaaaacagaaatatgaatataaaaggaatgatttttaatcattatatagcggataatatcatgcatgaagataatatacgcatgtgcgaatatatgacggggcttccgactctggcgaaagtttccatgggagacgtggacttgaatattgatatagcagaattaatttcattatacagataacaatataacggaatgaggaaagcaaaaataagaataattttaggagataaacttatgatctggtatccatatgtacagatgaagaaaatgaagacaccatataaaattgtagatgcagaaggagtttatttgtatacgcaggataataaaatgatagattccgtatcttcctggtggtgtatgatacatggctataaaaataaagaaattaacgaagcaatgaagaatcagattgatcaattcagtcatgtcatgctgggtgggcttactcatgaaccagtcttgaaattatcagaaaaactaaaagattttctcccgggagatcttgattactgttttttttcagattcgggttcggttgctgtagaggttgccttgaaaatggcattgcaatttaatattaatcgtggcagcggaagaaaaaaactcctttcgcttaccagctcgtatcatggagatacatttatgtgtatgaaggccggagatgatgaggattatcattttatattatcagaagatgataagaaggatgtaattcacattccaacggaaatggatgcattggaaaaagtatttcggacacacggaaatgaattttatgcatttattgtagagccacttcttcagggagccggcgggatgaaaatgtatagtattgatttcctgagaagggcaagagaactttgcaatgaatatgatgttgtttttatatttgatgaagttgcaactggtttcgggcgtactggaaatcgttttgtgtctgatcttgtacttccggatattatcgtgcttggaaaagcattgactgccgggtatataggacatgcagtgacagtagcaaatcataaaatatataatggattctattctgataaggatacagatgcacttatgcatggtcctacatttatgggaaatccggtcgcatgcagtgcagcattaaaatctatagaaatatttgagcgtgaaaactatatggaaaaaatcaagcatatagaggatatggttagaaatctggtctccggattcactcatccgcttatcaaagaaatcagatatatgggtggttgtctttgtttccaggtacatgacccatcatgtcttatcggatttcaggagtatgcatatcaacgaggagtattttcaagaccatttctcgatattatgtatgccatgtttccgtatatcatacaggataatgagatcaggcagattgttgatgtcatgaaagactggttcactgaacagaaaggaatttaatctatgagtgcggaggaattgtacagtattaagatgcgtgcaagcaaaaaggaaaacggtacggatgtacacatatccggagcagagaaaatcgttgaggcaccggatgttgatatatttgccaatgcgctgatagagagaggaatgcatcattccaagggtgaagcagatgcgttgaacttgaagataaataaagtctgcaaggagaacattatttatcttgatgcactttcagtagagacaattgaggtcgaaacatgggaaaaagggcaggaagagataaaaaaatatttaaaagaaactggaatagacaatccgcaagatgtcatgcaattcttagatgaaacttatgccatgagaggagctatgcttcttgatgttgacaggctcattcgtttagaaccggataaaaaacgtgggattcgtgctaccaatatggatcaggagagaatgaaaggggacagaatcggaaacgagaagaatcattatgaagaagcaattgtacttgcgacaaaagtggcaaattgtcctggtattattggtgagatatgtatttcagatgatcccgagtacgtgaccggttatgtgagctcaaaagaaatcggttatagaagaatcacgaagatgaagagaatggggagcgaaaaaggaggaagaatatttctgtttcgaggaacagatgcagaaaaacaaaaagcaattgattttcttcagaatcagcatgtgatcgtcagaaatgtacccaaaaagatttgcaaaaaatcagatatgaaaagaccacagaagtgggataaaattgataaagcactggtatctttaaaagaaaaccatctttttcgcacaatgaagacaatagaatcagcacagagttcacatgtaactatagatggaaaagattatgtattaatggcatccaataactacctggatattgccagtcatccttccataaaatcagcagtcgtagaatcgacagctatgtatggatttggctccggtggctccagacttacaaccggaaatacagtgatacataatgcactggagaataagattgcttcctacaaggaaacagaagcagcgatcgtgtttaacacaggatatgttgcaaatgtagcaacaatatccgcaatggtgaaaaaaggagatactgtttttagtgatgaattaaatcatgcaagtattattgatggatgccgtctttcaaaagccaaaattgtaacatatgctcataatgatatggatgatctgcgaaaaaaaatacaggagaatccatgtgagacaggcattgttgtcagtgatgcagttttttctatggatggagatatattaaagcttccggaatttcttgatatctgtgaagagaatcaattgttttccatggtagatgaagcacattccacaggagtgatcggcaaaaccggtcatggaatccgggaatactggcaggaaaaaagacaggtagatattttaatgggaacatttagtaagtcgataggtggcgaaggtggttatgtggccggagagacaagactgataaactatctgagaaatgtggcaagaggattcatattttctacttcactttcgccagtaaccatggctgcgaatctggctggaatcgaagttcttgaaaaggaaatctcaagagtaacaaaattgcagtacaatgtaaaatatttttgtacacaacttgggaaatatggtatcaatgtaaaatctgaaactgccataattcctgttattattggtgatgaggaaaatgcactgacagtttccaactatcttcatgagaatggatattttatatcagcgatacgttatccaactgttgctaaaggagcagcaaggcttagagtcgcgcttatgtccagccatacagaagcagaactgaaaaagtgtgcagaattaataggaaaagccttattgatgaagtaaaaatatgttaacactttaggagtgaataatcatccaaagacagcgagatatggaaaagacctgtatctcgctgtctttttattaagaaattcttagttttcatctgcaacagtttttctatttgaagactctagtgtatataacctataataaagataatgtgaaactgtttatagattttatgaaaatataggtgtttcataaaaaatggttataggaatcttcaaatgacatagatgattcgagaggagggaacagatattggataaagataattcgagggaaatacaattcaaagaggaattggtgcgcaaggcgaagaatggagatacgaaagcattttccctgttatatgccggcgtttgcaaggaaatgtataaattcgcattatatatgatgaagcatacagaagatgcagaagacgcggtaagtgagaccgttatatctgcatttgaaaatattgcgaagctcaagaatgagagtagttttaaaagctggatctttacaattttaggaaatcaatgcagaaaaatgttgggaaagcgtggaaatcatgtgtcagaggaagagacaccagaggctggacatgaaccggactatgagcagcattttgatgtgaaggaagcatttgcaaggcttgaggaagaagagcgtatgatactttcgtattctgtgttcgctggatatggaagtgaagaaatcgcgcagatgcttgagatgaatgctgcaacggttcgatcaaagaaaagcagggcacttgggaagatgcgtaagatgttggaagcaggatgatcttataagagatgggtttgaaaaaagaatagaagaaggaggcggaaaagatggaagaaaatagagaaaagaacaacaagaagattgaggatgaaaagcgtttagagcaggatttgagacagatggcagatgatgtgattcttccggactcactggaaccggaggcaattcagaaaatgcttcaggcaagacaggaagaaaagcagcagggatcaaaagccaaaaatagaaagaagaactggaaacgtatcgtgccgatcgcagcggcggcatgtgtctgtgtggtagttggagcgacagttggaatcaagcagattaataaaggaaacaacaaaacattagatgcagcgactatcgcatcagcagcagatcagacagagacaacccagacacttacaacagcgaaagattataaagaaattgaaaaatgtatcaaagaatataataagcagatggcacgggataacaacagtatggctatcggactgtatgaaagtgcgtcttcggcagacgcagcaacagcagaaagcagtaatgttagtgacacggggggctattcggatacgaatgtccgtgagaacggcgtgggggaagctgatattgtcaaaaccgatggaaaaaacatttatacactgtgtcggagtgttgtgacgattacagctattgacaatgggtccatggaaaagctggcctcgatcgaacagggtgcagaacgctatgtagaggacatttatgtacaggatgataaattagttctgtttggaacattaggaagacaggtgggaaattcagaggattcagaagcttatgatggatattatgagaacaatacttatgtccaggtatatgacatcagtgatccatccaatccgaaagagatcggtaacatggaacagagcggaggatataatacatccaggattgttgatggatatgtctatgtgcttagtcagttccatccttatgaagacaatgttacagcaagagatctgtggtatattccggaagtgcagggaaaatctatcgaagcagaaaatatttatatgccacaggaagcagaaggaaatgaatatacgatcattacagcattttcattagatgatccgtcagaaaaaacagacagtaaggcagtctttggttattcagatgtgtgctatgtaagcgaaaataatatttatattacaagtaattgttatgaagattcagatgtgagcagaacgctgatccgcaagatttcttatacagacggaaagcttgctggtgttgcgcagacgaagatcaagggaatgctgaacgattctttcagcattgacgagtatgaaggaaaccttagattagttacaacaattgatgaaatttattcgaatgatgatattatgccattgaatgagaccgcagatgagacggctgataagaacggaacaacggataaatcagatgcaagtaaggtgactgagaaggctgtggcagaaaatgtaaaggatgcggtacctggtacaaattcactttatgtactgaatgacaaactggagatcattggctccattcacaatctggcaaaagatgaaacaatctattccgcaagatttatgggagatacaggatatttcgttacttaccgtcaggtggatccattgttctcggtagatctttccgatccagagaatccgaagattcttggagagcttaagattcctggattttccgaatatctgcatccatatggagacggaaaactgcttggcatagggatggatgtaagtgaagatggatttacaacagaaggtgtgaaactttcgatgtttaatgttacagatccatccaatgttacagaggaaaataagtatacgattgaagaaagctatggtacagatgtaggatacaattataaaggcgtatttgtagatgttcagaagaatctgttcgggtttattacctatcatgatggagtgacttatcagttgtatacgtatgatgaggcagaaggattcaaagaagtgatgagcagacagctgagcggatatgaaggcagcagaggactgtatattggtgacgtattttatcttgtaagcggaaatatgatagaatcgtattccatgaatggattcgagaagatggatgatatcgttctgtaaacaatttgtaactgttcagagctaacctccaaaatactacgcattttatacctttttttgaaattttgcttggctctgaacagttacaatattttggattgacagtttgtaagacgaaaattatactaataggagatgaaatttgtttgaaattgtagttttgtaataagagaaaaggggttagaaatcatgagttccagaaataaaggaatttgctttattatattatcggcattttcatttgcgttaatgggtgcctgtgtcaggcttgcgggggatgtgccgtccatacagaaaagctttttccgaaatctggttgcattctttgttgcacttataatgatcgtgcgaagtggtgacggatttgaaatcaagaagggaaacttaggttatatggttttgcgtgcaacatttggcacgatgggaatcctttgtaatttttatgcagtagatcatctggtgctttcggatgcatctatgctgaacaaaatgtctccgttttttgttattttattttcgtttcttctgttgaaagagaaattaaaaccggcgcaggcaattgcaatttttgttgcatttatcggaagcctgtttatcattaagccaacctttacaaatatggaactctttccgtcagtgatcggtctatgcggaggaatcggtgctggtattgcgtatgcaatggtaaggattcttggtcagagaggtcagaaaggaagctctgttgttctgtttttctcagggttttcctgcatcgtgacacttccgtatctgctgtttaactatcatccgatgacaggaacgcagatgctggcactgcttggtgccgggcttgcggcagcaggaggacaatttggaattaccgcagcatattatcatgcacctgcgaaagaaatatcaatctatgattattcacagattattttctctacgattctcggatactttcttttcggacaggttccggacaagtacagtgtgctgggatatgtgattattctcgcaatggcagcatggatgttcttctataataaaagaccggaagaaaaagaatagaaactgtttgaagccaaatatatttcagatgaaaaggattataaaatcatggattttgcaagacttgagaaaaatattatagatgtaataaaggaagaacaggcgaagctgggctaccgtaaggagaagattcgtctgtattatccgctgagttctctgaatcatttctttcagttagatgtggatgagacaggaatgcaggaaaaattgagccggttttctgagtatgaagaagggaagcttggaagtgttgaagtgacaagtaagggggagcggttctgttttcatattccggaggaaggtgcagaatatgtacacaataatatgaaagagaatgaattcatcaaagacctgatcgggttgatctctcatcatggctgcaagatggaagatatctttgaactgttccgtcagcattcggatcagattacgatcgaagagatgcacagcgatgaatttgattatatgatctgctttgaaaatgatccggaggatacttaccggtattgctttaaagatgaaggatgccatatcatttaccatagattcctgccggaagattatgaagaatttggatttggaaaataactgtcaggtcagacaaaaaggagaaaaaagtgaagcttacaatacttggaacaggaaatgcaaccgtcacggagtgctataacacatgttttgtgatcagtgataacgaccgtcattttatggtagacggtggtggcggaaatacgattcttcatcagttaaaagcagcaggacttaactggatggatatgagagatatttttgtgacacacaagcatatcgaccatcttcttggaattatctggatgatgcgtatgattcttcagaatatgaatagaggaaaatacgaaggagaagctacaatttacggacacgaagaagtaatccgtattctgaaagagatggcaggtgaagttctttcggcgaaggagatgaaatatatagatgatcgtcttcacatggttgtagtagaagatggagaagaacgtgagattattggaaagaaagtaacatttttcgatattcattctacaaaggcaaaacagtttggattttgtatgcagttagatgaggatgagaaactgacctgttgcggagatgagccgtacaatgaattagagcagaagtatgctgagaacagtacatggctcttgcatgaggcattctgtctctacggacaggcggatgagttcaagccatatgagaagcatcactccacagtaaaagatgcatgtgagatggcagtagacttgaatgtggagaatctgattctgtatcatacagaagataagaatattgaacacagacaggagttgtatctggaagaaggcaaagcttattatgacggaaatctgtttgtgccggatgatctggatgtgatagaactataagaaatttaatcccacagcaagtttgttatatgctatactttgtttatgatcaggttgaattgataaattcagggagaggtgaaggagaatgcttgagttagtaacaggaggcagcggaagcggaaaatcagcttatgcagaaagccggatctgtgaatggaacaggcaggatccgaagtctctcttttatattgcaaccatgtatccttatggggaagagacagaaaagaagattgagagacatcggatgcttcgtaaaggaaaaggatttgagacattagagtggtatacaggacttaagctacatttggaagagggatcattacaaggctcagatgtgcttctcgaatgtatgtcgaatctcgtggcaaatgaaatgtatatggaatccggtgcaggatgtcatgcagatcaagccattctgaaagggatccgagaattgaatcaacagtgttcgaatctggtgatcgtgacaaatgaagtgttttccgaatcagttccggattcgccggagatgaaagaatacaaaaggattcttggcaggatcaactgtgaaattgcagcgatggcagatcaggtgacagaagtcatttatggaattgcacagcagaaaaaggaaccggatacgctagtcaatagaacagaaaaacctggcgtggacagtaacaaatcaggagagtcggtgatgtgtcagaaagaaaatagagttcatataattataggtggtgcatttcagggaaaaacacaatatgcaacgaaaatttatccagaacttgggctgactgatgggattaattgttcgctggatgaaatcagaaattgtgtggcaatcaataaattccattcatttacaaggcgctggcttttggaaggaagaacaaaggaagcattactgacgatacttgagaacaatagaagccttcaattattaattagtgacgagataggatacggtcttgtacctatcgatgattttgaaagagaatacagggaattttacgggcgtgtcatgacggaacttgcagaacaggcagattgtgtagaacgtgttgtgtgtgggattccgcagagaataaagtgaaaggaaattagggatgctttcagagatagaacaggtacttccttctgaaatagagaagagaagttttgagattataacagaagaattaaaagagatgggaaagattctctgtccggagacagaactgatcgtgaaacgctgtattcacacaagcgctgattttgagtatgcggacagtcttgtttttacagaaggtgttgtggagaaagcaaaggatgctatccgcagaggtgtgccgattattacagatacacagatgggaaaagcaggaattaataagaaacgtctggcagagtatggcagtgaagtgctttgttttatgtcggatgaagatgtggcagagatggcgaaaaagaatggcacaacaagagcggtagcaagtatggataaggcagctgcactgggaagagaggctatctttgcagttggaaatgcaccgacagctttagtacggctttatgagttgatcaaagaaggaaagattaatccggaattaatcattgcagttccggtagggtttgtaaatgtcgtgcagtcaaaggaactgatcttaagtctggaagatacaccgtcgatcgtggcacggggaagaaaaggtggaagcaatattgccgcatgtatttgcaatgctttattatatcagatgtaaaacagatgcaaaaaaactttgttagaacttgttagaaagatagaatagtggtattataagactgtttgattagaaaaaagaatagagagggaacaaaacgtgacctataaagaagcaagggtatatttggacgagatgtcgaaatacggaagtgtacttggcttagatacgattcgaggtctgttgcgtgagcttggaaatccacaggatgacttaaagtttatacacattgcaggaacgaatggcaagggatctgtgcttgcatacacttcaacaatattaagtgaggcaggatacagaaccgggcgctatgtctcaccgacagtaatctcttatctggagcggattcagattgacggaacatggattccggaagatgaatttgcagaattgacagagaatgtaaaagaagctattgcccggatggaggcggccggagaggaatctccgacagtctttgaagcagaaacggcaatagcttttctgtattttaagaagaaaaaatgtgatctggtcgtactggagtccggtctgggaggaattctggatgcgacgaacatcatcggagcaccggtgtgtgcagcatttgcaacgatcagtgtggatcatcttggtgtgatcggagattcgttggaagagattgcgcagaacaaggctggaatcattaagccgggatgtgcagtagtatctgcgaagcagaaagaaaatgcccgggagattctgaaaaaaactgcagaagaaaaaggctgtcctttcacagaagcgcagccggaacagatgatgatttttgaagattcctaccacggaattacattttcttataaagaatatgaaaagatgcatagtccgcttgcaggccagtgccagagagagaatcttgcaacagcgctcgaagttatccgctgtctgaacagactggggtatcggattacagaagcgcaggtgcgagaggggctttcaaagacgagatggacaggacggtttacctgcctgtcagagtccccgttatttttcgtagacggagcgcataatgaagacgcagcattaaagctgaaagtgacggtagaacgctatttttcgggttataagaaaatctttatcatgggagtctttaaagataaagaatatgagaaaatcacatctattctttgcccgttggcagaaagtatatatactgttagtcttccaaataaggagaggacgcttccggcagaaaagctggcagaagtagtgaagaaacattgccagaaagtgaaagctgaacagaccatcgaaacagctgttgaggatgcaagtaaagaggcaatgacccaaggcaaggatattgcgcagaaaactgtgattcttgcatgcggatccctgtcttatcttggagaggttcagcggatcgtgttgaataaccggcagtgagatataggagagaaatataaaatgatagatcatgaaaaagtagaacaggcagtccgtcttttgttggaaggaatcggtgaagatgtgaaccgcgaaggtcttatagatacacctgacaggatcgccagaatgtatgaagagatatatggtggaatggaagaagatgcgggagttcatcttatgaagacatttacggtagaaagcagtgagatggtgatagagaaagatattacattctattcaacctgtgagcatcatttactgcctttttatggaaaagcccatattgcctatattccggatggtaaggtggtaggactgagtaagttggcgcgtacggtagaagtatttgcaagaagacttcagctccaggagcagctgacaggacagattgcagacgcattgatggagtatatgcagccgaagggagctctcgttatggtggaagcagagcatatgtgtatgacaatgcgcggaatcaagaaaccgggaagtcagacagttacattggcacggagaggtgtgtttgagacagacccgacattagaagaaagattcttccgtatgcttggaagataaagaatacgtaaaggaaaagaagtgaacagacttgaaacaggaaaatatgtatcggttaaatgaagtggtccatcactggatctatcaggattattatggaagaatcaagcggttagagaaggagcgtatcttttgctgtcatcagatgccacattttctggatgtagcaaggatcgcatatattaaaaatctggaagagaaccttgggtttgagaaagatgtgatctatacggcagcagtacttcatgacattggaaaatcatttcaatataaatggacaattccacatgaagtagcaggtgaaaagattgcaaaagagattttaacaacattacctgaagatgcacagtttacagaagaggaacagcaacagattcttcgggctatccgtggtcatcgcagaaaacatgagggaatggaaccgattgaagaattgttttatgacagtgacaaacgctcgcgtatgtgtcattcctgcccggcacagaaacagtgtaactggacggaagaagagaagaatatggagatagagatatgagaattggcggaaaagaatttgacctgaagaaaaatacctatatcatgggaattctgaatgtaacaccggattccttttctgacggaggaagatacgacggattggatcgtgcaatcgaacatgcgaagcagatgattcaggaaggtgtggacatcattgatgtcggtggagaatcaactcgtccgggacatgtacagattacagaagaggaagaaattgcgcgtgttgttccggtgatccgaaaactcaaaaaagaatttgatattccggtatcgattgatacttataaaagtgcagttgcagcagcggcaattgaagcaggcgcggatcttgtgaatgatatctggggattaaaatacgattctaagatggcaggattgatagcaaaaacaggagtagcgtgttgtctgatgcataatcgtgagaatacagattatcagaatttccttgcagactttatggatgacatgaaagaatgtgtgaagattgcgaaggacgcggggattgcagatgataggatcattcttgatccaggtgttggatttggcaagacatacgagatgaatctcgaaattattgataaacttgaaattatgaaagaacttggatatccggtacttcttggaacttcaagaaaatcagtgatcggtctgacactggatcttccggtagaagaacgtgaagagggaacgatggttacaacagtttacggagtgcagaagggttgtgcatttgtccgtgttcatgatgtggagaagaataagagagcaatccgtatgacaagagcattaatgagagaacatgaggtatagaggacagatgcagaagaagttcgatgaaatcagaattgaagatctggaagtgtttgcaaatcatggtgtgtttccagaggaaaatacgttaggacagaagtttgttgtctcagcagtgctttttacagataccaggatggcgggaaaaacagatgatctgacagcgtccatccactacggagaagttagtgcatttattactgaatttttacagaaaaatacctatcagttattagaacgtgcagcggaagaactggctgaagcgttgcttcttgagtgggacagaatagaaaaaatatctatagagatcaagaaaccatgggcgcctgtaagacttccattaaaaacagtcagtgtgaagatagagcgtggctggcacacagcatacattgcgttaggatctaacattggggacagtaagatgtatctggataatgcagtaaaggcattgaatgaacttccgacaagtaaagttgaggtcgtatctgaatatcttgtgacacctccctacggagtgacagatcagccggatttcctgaacggctgtctgaaacttcgcacgctgctttatccatatgagcttttagctgaattgaacagaattgagaaagaagcaggaagagagcgaatcattcactggggtccgagaacattagatctggatattattttttatgacgatcttgttcttgaagaggcggatctgtgtattccgcatgtagagatgcacaagagaaaattcgtgctggaaccgttgggagagatcgctccgtataagcgccatccgataagtggaaaaagcgtttgcgagatgcttgttgaactgaatgaaaatgataattagaggctgttaaaaactatgagaaacacgctctgcgagtttctcaagttatcgcgacagtcgccaaggtctcgtgcaagcacggactttggctcgttgttcacgtaaataagagctggacagaagtgtgttgaaaacttctgtccagctttttgtagtcagaaaataattaaatcaatttgtttacagcagctgctcaaaggtgtcataaaatgttgggtaagacacatctacgcatttactgtcaagaatctttgtagtaccttctgcaacaagtgcagcaatactgaatgccattgcaattctgtggtctaacaaagtatgaatagaagcaccatgaagaggtcttccgccattgatgatcattccgtcttcagtaggtgttacatcacagcccattgctttcagattatctgttacagtctcaatacgatccgtttccttgactttcagttcagcagcatctttgattatagtagtaccttccgccatggctgccataactgcaataaccggaatctcatcgatcaaagttgggatgatgtctccttcgattgtagttccatgcagtttacttgttcggacaagaacatctgcaattctttccccaccttctgtacgttcgttaaggagggtgatatcaccacccatatcttcacatactctcaagattcctgcgcgtgtcgggttgattcctacattttctacaagaatttcagaatcagggacgatcagtccggcagcaatgaaataagcagcggaagagatgtctcccggaactgtgatttcctgtccgtaaagttcttcacaaggacggatgatagcggttgctttggaagaaccaatctcaaaagtagagcggatatctgcaccgaattctttcagcattaattctgtatggtttctggaaagactcggttctgtgacagaggtctctccatctgcgtaaagaccggcgagcagcaggcaggatttcacctgcgcactggcaaccggcgaatcataatggattccatgaagctgcgcaggggtaatataaagcggggcacatccattgcggagaatactggaaatatgtgcgcccatctgtgtcaatggttcaatgattcttttcattgggcgggagttcagtgattcatctccggacaatttagagtcaaacggctgtccggcgagaataccggaaatcagtctcgttgttgttccgctgtttcctacatcaaggatcttctccggagcactcagtccatgcaatccctttccgtgtacgataacggaagaataatcgctctcaactttaatctcaataccaagctctctgaaacaacggatagtcgcgagacagtcggcaccagagagaaagttgtggatctgcgtcgttccgtttgcaatcgagccgaacataatgcagcggtgggagatggatttgtctcccggtattgtaacttttccttttaatcctgtaatattacataattccataattttattcctcatttctgctatcagacttcatagatgacatagcggtatttctgcaaaagtacagcagctctgtttgcagaatcttcatcataaaattcaatacgaagaactccttcctcaaattcacgattgtggatgattccgatattcttgatactgatattattacttgcaagaattgtggcaatcgtagcaattccacctgtttcatcgatgatatcacaataaagtgcaaactgctttttgatcggtcctgcagatccgtttggcatggagttcctgtaatctttggaattctcaaacagagcgtacagggcaggttcatttccttcatccacaagatcctttgcatgtgaaagagcttcaatatattcacctaagatctgggagatgttctcactgttttttagacagatctgctgccacatgaccggggaggaagaagcaattctcgtaatatctttaaatccccctgcggccaacgctttcatcatcccttccttcgaatccgtatcatgtacaaaattcacaagtgtggatgcaataatatgcggcaggtggctgatcgttccggtaatatgatcgtgctcgtggtaatccagaataacaggaagagcttttaaagatgaaacaaagtctttgtaagcatccactttttcttccgctactttagcagaaggagtcaggatatagtatgcattttcaatcaaatgagctttggaattcataaatccgctcttctcagaaccagccatcggatgtccgccaatgaaattcgcttccattcccagacgaatcacctcttcatggatggaagtcttcacgcttccgacatctgtgagaatacagttttcatccaggagatctttcagctgggaaagataggctgcgttgtaagtgaccggtgcgcagaggaaaatatagttacatcccctgaaattgtcatcaatggatgaacaggaagtatgaatagtgccttcctggattgccagtgcaagggattctttatttttatcgaatgcgatgatgtcgtaatccggataatactggcggattgccttcgcaatagagccgccgataagtccaagtccgataaatccaatttttttagcattcatagttgtaaaatcctttctgttgttgtgcaaaacatatcttactgttcagaaatcttaaatcagtaagaaacatatattcgtattttaacactttgctctgtaaaagtaaattggtaatattgcgttgctggtcgcacattgtgtgaacagcaacacaatattgcttctatatataagcggagtgttttcaaagaatagatttgtgatagaaagttaaaattgtataaaatgtaaaaaatagttgtaattaatcagaatatttagtacaatatacccatggtatgtatatcgacgacaaaaacgatgtgcataatagctacataacaaggaggcagcagtatgaaggtttacagaacagacgaaatcagaaatgtggtattacttggtcatggtggaagcggaaagacaagtcttgcagaggcgatgctctacgtatcaggtgcaacgaatcgtatgggaaagatttccgaatccaatacggtgagcgattttgataaagaggagcagaaacgtggattttcaatcagcacaagtctggtaccaatcgagtgggagaaagcgaagatcaatattcttgacacaccgggatattttgattttgtcggagaagtagaagaggcagtcagtgcagcagatgcagcggttatcgtagtatctggtaaggcaggagtacaggttggaacggaaaaagcatgggagctttgtgacaaatataatctgccgagaatgatctatgtgacagagatggatgtggatgatgcaagtttccgtcaggtagtagcagatctgacagagagatatggaaagaaaatcgcaccacatttccagccgatccgtgagaatgagaagcttgtaggatatattaatattattaagaatgccggaagaagatatacaggcattggacagagagaagagtgcgagattccggattactgtatgccgaaccttgagattttgagagattctcttatggaagctgtagcagagacaagtgaagagtttatggagcgctattttaatggtgaggaattctctatagaagagatccgtgcagccatgagaacagaagtaatggatggggatatcgtaccggttgcgatgggatccaatatccaggcacagggagtagccaacctgctttcagatattgttcgtttcttcccgagtccggataagagaacctgtgcaggaatcaaccgcagaacaaacgagatttttgaagcaaattatgatttcgcaaaagcaaaatcagcgtatgtatttaagacaatggtggatccatttattggaaaatactctttcgtaaaggtatgctccggagtacttaaaggagatgatgtactttataatgcagacacagacgcagaagagaaaccaggtaaactttataccatgtgcggaagtaagccaagcgaagtgacagagctttttgcaggtgatatcggagcaatcggtaaactgacaaatacaagaacaggagatactctttccgtaaagggaacaccggtatcttatgcaaagacagattattctgtaccatatacatatatgaagtatcgcgtaaagaataaaggcgatgaagataaggtatcacaggctcttgcaagaatgacagcagaagatgttacattgaaagctgtgaatgacagtgagaacagacagtctcttctttatggaatgggtgagcagcaccttgagatcgtagcaagtaaactggcggcaagatataaagtagagatcacactggagacaccaaaagttgcattccgtgagacaatccgtaagaattctgacgttgattccaagtataagaaacagagcggcggacatggacagtacggacatgttaagatgaaattcgaaccatcaggagatctcgaaactccatttgtattcgaagaatgtgttgttggaggagcagttccgaagaactatttcccggcggtagagaaaggtttgcaggaatctgtagtgaaaggacctcttgccggatatccggtagttggtgtgaaagctactttatacgacggatcctatcatccggtagactcttcggagatggcatttaagacagctacgatccaggcattcaagaaaggatttctggaggcatctccggtacttcttgaaccaatcgcatccctgaaagttacagttccggatgattacacaggagatatcatgggagacctgaacaaacgcagaggacgtgtgcttggcatgacaccggtagccggaggaaagcaggttattgaagcagatattccaatgacaggactgtttggctattgcacagcacttcgctccatgacaggtggaagaggatcttacgaatatacatttgcaagatatgagcaggctccatctgatgtacaggagaaagaaattgctgcaagagcagaagaagcataattaaagattcaggcaatacaaagagtgtgttatccggctgataaaaaggagtggatagcacgctcttattgcttgttttagaaaaaacagtaacattatatttcacaaaaaaatcacaagtttgcgaatatggttgtactttcaaaacaaaggtgctataattcatctacctgtctgcattagacaggtatgttgttgtttatgaaatcctgtgaacagtgacataaagtgactgtgtagagcagttataagattattataataatatgagggataagaaaatgaggattattattatcggtgacggaaaggttggttacaagcttgccaagcaactttccgccgagaaatatgacattataatgattgacagtaatgaaaataagttgagatttgctatggatcgtctggatattgcctgcgtgacgggagatggcgcagacgcagaagtacttaaacaggcagatgtagcgcatgccgacctggtgattgcttgtacatcagcagatgaatgcaatatgttaagctgtctgatcgccagaaaattaggtgcaagacatacgattgcccgtgtgcgtaatccgatttattatcgtcagatcggacttctgaaagaagatctgcatcttagtatggctgtaaacccggaacttatcgtggcagatgagattagcagacttctgctcttcccggatgcgagtcaggtggagacttttgtgaagggacgtgtagaattgattgaattaccggttgcgaagggaagcagcctggcagggttaagccttgcggaaatgtataaccggttccagatccgtctgcttgtctgtgcagtggaacatggagatgaagtttgcattccagatggagaatacaggatgcgtgcaggagaccgtctgcatattgcggcatctcataaagatttagaggcattttttaaagcaaatggaaagcgtaaggacaaaatcaaaaaagtcattatttgtggagctggaagagttggttactatcttgcacttcagcttagcacacttggcatgcagataaagatcatagaacagaatcgccagagatgtgaagaactttgcgaattacttccaaaagcaacgatcattaatggagatgcaacagatcatgaccttcttgtagaagaagggattgatgaagcggatgcatttgttgccctgacagggatggatgaagagaacattatactttctctttttgcaaagagtcagaatgtggacaaaattgttacgaaagtcaatgaagacagacgtgcacgtatggtagaagactttggaattgatagtattgtttctgttaaaacagctacagcagacgcaatcatgagttatgtcagagcgcgtaaaaactctcagggaagtgcgaatgttgagacaatgtatcaattggttgatgacaaagttgaagcactggaatttattgttaaggctgagacaaattatacaggaattccattgaagaatctctcgttgaaaccgaataatctgattgcatgtattgcaagaaaacgtcagatcattcttccgagcggagatgattgtattcaggtaggagataatgtgatcattatcacgatggaaaaacagattgaagatattaaagatattttaatgtaggtgcagcgtgatgaataagaagatgatagtatatattttggggaaaatgatgggagtcgaaggattacttcttctgatcccagcgttggtttccctgatatatcatgaaaaaagcgtaatttcttttctgattgtagcagcagtcctgctcgtaatttatatggtgttcggaaggaagcttccggcttcaaagcagatttacggaaaagaaggttttgttattgttgggcttgcatggattttatggtccgcattcggagcgcttccgtttgtgatttcgggaagtattccatattatattgatgcactttttgagacaatttccggtttcactacaaccggatctacaatcctggcagatatcgaggctctgccaatgggaatttccttctggcgaagctttacacactggatcggtggtatgggggtacttgtatttgttatgatgatcacatctttggatgatgagaatgcaatgccgctcatgcgtgcggaagtaccgggaccggaggcggataagcttgtcccaaaggcaagacataccgcaagacttttatatggaatgtattttgttctgacagcagcagaagtggtttttctgctttttggcggaatgaacctgtatgatgcacttttacatgcattcagtactgccggaacgggaggattttctaatagagctgcaagcgtcagcttctacgacagtgcatatattgatggtgtgatcacagtatttatgattttgtttggaattaactttaacttgtactttttcatattgctcaaagactggaaatccattctgaaaaatgaagagctgtgggcatatcttggaatagtaggtgtgtcaatcgctataatcacaggaaatatcctcaagatttatggaacggttgcacatgcattccgctatgcatctttccaggtcggttcgatcattacgacaaccggatttgcaaccgcagattatgaccagtggccggaactctcgaaatcaatattattggcacttatgtttgtgggagcctgtgcaggatccaccggaggaggtattaaagtaagccgtttattgatcatcgtgaaatcaatccgcagagaagtgcgtaagatgttacatccgaacgccgttacgatcattaaagtcaatggtaaaaagattggacaggatacattgaagaatgtaaatctctatctgacgtgttacattataattatgattgtatcaattttacttgtctctattgataattttgattttgcgacaacatttagtggagtacttactacgatgagcaatgtaggacctggaatttcaaaggtaggacctgtgatgaatttccacccattttcaacagtatccaagctggtattctgctttgatatgctgattggaagattagagatcttcccatacctgcttctgctttctccggaactctggagaagaagattctagatgattttttgttaattatgtgcggaaaaatttgaatgaaacagattttttcgcacattttatttttatatgataaaatggtaactgttcagagctaagcaaaatttcaaaaaacaggtgtaaaatgcgtagcattttggaggttggctctgaacaattacgtaaaatgaaagaaaggaagaggtgagatgaacaaatttaaaatgaaagtgacagctgtcataggagtgattctgttgattggaatctattactatgtgacactcccggcgatcaatattcatgcctcagaattctggatgtatcttgtggtgttggtcattctggcagctgtggtatttatcagaaagaaaaatttaaaccgttacgactggaaagagtcaaagggattaaaggtgatccttggaatccttgcggtgcttgtgatcgcatatgtggcaggatcagttttgtcttctccaattgtgaatgcgaagaagtatcaggaacttttgacggtgaagaatggagaatttacgaaagatatcgaagaattatcttttgatcagattccattgctggataaggattcagcagagcttctcggtgacaggaagatgggaagtatggtagatatggtatcccagttcgaggtagatgaactgtattcccagatcaactatcaggatcagccggtgagagtttctcctttgaaatatgccagtgtgatcaaatggtttacgaacatgagagaaggaatcccagcctatatcaagattgatatggcaacacagaatacggaactcgtaaaactgagtgaagggatgaagtacacgacaagtgatcattttaacagaaatatttaccgtcatctgagatttaactatccgacctatatttttaatgatctgagttttgaaattgatgaagacggggttccgtactggatctgcccggtgaagaagtacaatatcggattattcggtggaacaacaatcggaagagttgtactttgcaatgcaatcacaggagaaacgaaggattatgcagttgaggatgtcccacagtgggttgacagagtatattccgcagatctgttagttgagctttataattatcacggaacattgaaacatggtttctttaatagtgtattggggcagaaagactgcctgaatacaactgacggatacaattatcttgcaatcgatgacgatgtatgggtatacacaggtgttacctcgattaccggagaccagtcgaatgtagggtttgttctgatgaatcagagaacaatggagacaaagttctatgagattgaaggagcaacagagagttcagcgatgtcttctgcagaaggccaggtacagaatctgcactatacggcaacattcccactgcttttaaatatttccggtgaaccgacctatttcattgcattgaaggatgatgccggtctggtgaagaagtatgcgatggtaaatgtgcagaaatatcagattgttgcaattggagatacggtcagtgaatgcgaggagtcttacactaatctgatgtataagaacgggatcaagacagaagctgaggatacaagatccgtagatacactgacagctaagatcacaaagatcgcccagggcgttatagacggtgattctcattattatatcatgcttgaaggctcggatgagatctttgatgtatctgttgtagattttattgatattatccggtttaatgtcggagatgaagtcacagttgagtataagaagggggagcaggtggatacagttctttccctgaatggaaaagcgagtgaacagatcagcacaaaagctgcgaaagaagagcagacagaagatacggcaggggattctgcacagacagaataagagaaagaagcgaaaaaagaagtacaaccggagaacggaagtacttcttttttgactcctgaaattattgtaactgttcagacccagaagggcgaatcctgtgttacactacgctgtaaatgcttacagaactgtgcatccaagtgtgtcaacatctgcaatctcagctttatctgcgctgacgctgaggtagaagtcaatcttggcatcttcggaaatcttatttaatttctcgatgaatgttggaagactttctaatgtgatattagcctgctttaagatactgtcaatgaaaacagcctcgatatcgtgattgccagcagccataccatagaggaaacctacgaattcttctaaggtaaggatgtcaggataatcagccatcttgatgacacggatattgaaatctacagaataagtgtctttgctgctccttttaataaatacgacattaccggaagaagtcttaaccttctcgtttgcaagatcgatcatctgctgtgtttttccgctgcctcttgggcctgtgattaaatttaccatggcgaatctctcctttatgtaagtgtgtataatgtttgagattttctcacctctcaaatatttataaattcattatacactaaagatatgtgagtaacaactaaaaaagtgttaaaatttgaaaaagttttatgcggaattaccataagaaatgagcagtaagatgccaccacggtaatgagaaaagttctcaaaaactgtattgaaaatcattttcatttatgttaacataataattgaatgaaaactattctcaaaataaagctaaggagaacgatatgccgacggaagtattatcctactatctaaaaaataaagaccggaaggtgaggcttgggtttcaggttatattacagtgtgcgccttttctgaaagggcttaaagtatctggcctgatttcaatggaaaatgaatcatattctgaattggaagaaatgttttccgggatggagatcaatttttataaattatcctgctcagaggggaaatgccttgtccttttctatcgccccaaagagctggaagaatatatgaaccagccaaaactccgcgaactgatcggacaatacggatataaggaaagcaatatcgaggaaatgctggcacatctgtcagaacgtatctgcgagtgtactgcacaaggaattggattcccacatgagattggactttttctcggatatccgacggcagatgtgcagagctttattgaaaaagaaggcagagattttattatgacaggatactggaaagtatatagtaatcctgaaaaagcgagaatgatttttcatgaatatgaccgtgcaaaggtttgtgcggtgaatgagtatctggatggaaaaaacatccgtgaaattgcattgaatcaaagaaagtggaggaatttataaaatgagtatatcagttgtatattggagtggaaccggtaatacacaggcaatggcagaggcggttgccgaaggaatcaaagcggcaggtcaggaagcagaacttctggaagtaggggatgcagatgcaaaaacagtggcagaagaagctgcatttgcgcttggatgcccggcgatgggggcagaggtgcttgaagaatctgagatggaaccatttgtagaagaactggaatcttatgtgtcagggaagaagatccttctcttcggttcttatggatggggagacggagaatggatgagagactgggcagaccgcatgaaaaacgctggggcacagttgatccgtgaagaaggaatcatcgcaaatgaggctccggaggatgacgtacttgaagaacttaaggcagcaggaaaagagctggcagaataatcttattgttaatgtttattaataaatattagtaatcttaattgaaaaaatgtttgaaacgtattgcatttcttataacatagtgctattcttaattttatcgtgttaaagcacgaaagagaaaacttgctgtcattcacatctgacgtgaatgacagcaatactcaggagagtctctttaaaaagagcgccgaaggtgtaagcggtcatggatgcagttacatgccgcgagtctctcaggcaaaaggatggaggaataaagaaatgtttgcacaaatcgacaaaatcatcactgcaatcgacaatgctgtgtgggggcttccgttgatctgcctcatcatggcaacaggtatctttctaacagccagacttggtcttgtacagatcaggcatcttggcaaagctttcaaattcatgtttaaagatgaagaagacggtagtggagaagtgaccagctttggggcactttgtacagctctgtcagcaacgatcggaaccggtaatatcacaggtgttgcaacagcaatcgcacttggtggtccgggagcgttgttctggatggttatcgcggcattctttggaatggcgacaaaatacgcagaaggtcttctggcaatcaaatatcgtacaatcgacgaagacgggcatgtacttggcggaccattctattatattgaaaacggaatgggtaagaagtggacatggcttgcgaagatttttgcattcttcggagccggagttggtctcttcggaatcggtacatttacacaggtaaacagtattgcatcagcggttaagaacttcttcgacccggatatggcacatacagtttccctgtttggaggaaattattcttgggcaactgtagtcgcaggagtaattctgacattatgcgtaggtcttgtagttcttggaggaatccagagaattgctaaagtatcagaagttatcgtaccatttatggcagttctttatgtaggacttgcagtaatcatcattattacaaatatcacagctgttccggcagcactggcttctatcgtgaaatctgcatttacaggaagtgcacttgcaggaggagcggttggatccgtgttcgtagcaatgcagaaaggtgttgcaagaggaatcttctcaaacgagtccggacttggtagtgcaccgatcgcagcagcagcagcaagaacaaaagaaccggtccgtcagggacttgtgtctatgacaggaacatttattgatacaatcgtaatctgtacaatgacaggactttctatcgtgatcgccggttcctggctgaacccggaacttgaaggtgtggcaatcacaatggatgctttccagaaaggacttccattcccatcgttcgtagcgacattctccctgatgctgtgtcttgtattctttgcattcacaacaattctcggatggaactattacggcgagagatgcgtggaatacctgtttaacagaaataaaggagttgtaatgggatatcgtatcctgtatatccttgcagtattcattggaccttatatgacagtaaaagcagtatggaatatcgcagatatcttcaatgcactgatggcattcccgaacctgatcgcacttcttgcattgaacggagtgatcgtcaaagagacaagagatttccatgcaaaacataacggatcttattagaaaaagaattgaccgaattatctgtgaattcgaaaaataaatagaattattacctgaaataaaacgaaagaaaaggcagccaaagtccttgaataaggactgtttggctgccttttccgcaggtgtgaaaggagaatgagtagacagataattcatagacagttttgattttgtataacagatggagtaaagattatcagttaaatgaaaaactcaaaaaatgtagcagatgttctgaaaatacatgatactgtgttttggggattgcattatactatattttgtattagaataagtatcagacagcacgatagaaacggataaaacacaagatatcgtgcaagaataagaaaaagtgaggagactgatcaatgaaaattatcaagcgaaatgggtcggaagagacatttgatatacagaaaatcgtggttgctgtgacgaaagcggataaggataatggggagcgtacgctgacagacagccagattgaagatatcgcagaatatgtggaattcaagtgtaacaagttgaatcgtgcagtatccgtagaagagatccaggatatggtagagaatcagattatggctaccggagcttttgaacttgcacgtaagtatgtaagatatcgttataagagatccctcgtacgtaaggcgaatacaacagacaatcgtattctgtcactgattgagtacaacaacgaggatgtaaagcaggagaactcgaacaagaacccggcagtcaacagcgtacagagagattatatggcaggagaggtcagccgtgacctgacaacaagaatgcttctcccacatgatattgtggaggcagacagagaaggaatcatccacttccatgattctgactattatgcacagcatatgcacaactgtgatcttgtgaatctggaggatatgcttcagaacggaaccgtgatcagcggtacaatgattgaaaagccacacagcttctctacagcatgtaatatcgcaactcagatcattgcccaggttgcaagtaaccaatatggcggacagagtatctcacttgctcatctggcaccgtttgtagatgtttccagagagaagatccgcaaggaagtgatcagcgaacaggaactggtcggaatggaatatccggaagatgtgctcaatgagatcgtagagagaagactgaagaaagagatcacaaagggtgtccagacaatcgaatatcaggtgatcacactgatgacaactaacggacaggcaccgttccttacagttttcatgtatttgaacgaggcaaagaacgagagagagaagaaagacctggcgatgattatcgaagagacacttcgtcagcgttatcagggagttaagaatgaagccggagtatgggtgacaccggcattcccgaaactgatctatgttctggaagaagataatatcgaagaaggaagcgaatattattatctgacagaacttgcagcaaagtgtactgcaaagcgtcttgttccggattatatttccgagaaaaagatgaaagagcttaaagaaggaaattgtttcccggttatgggatgcagaagctgcttaagcccatggaaagacgagaacggaaactacaagttctacggacgtttcaatcagggagttgttacgattaaccttgttgatgttgccctttcttccggtggagatatggataagttctggaagatctttgatgacagactggaactttgctatcgcgcattgatgtgcagacacaaccgtctgaaaggaacactgtctgacgcagcaccgattctgtggcagtttggagcacttgcccgcctgaagaagggagaaccgattgataaacttctctatggaggatattcaacgatttctcttggatatgcaggactttatgagtgtgtgaaatatatgacaggaaaatcccatacagacccggatgctacaccatttgcactggatgttatgaagcacatgaacgatgcatgtaaccagtggaaagaggagacgaacgttgctttcagtatctatggttcaccgattgaaagtacaacctataagttcgcaaaatgtctgcagaagagatttggcattgttccgggaattacagataagagttatattacaaacagctatcatgtattcgtcggagaagagattgatgctttctcaaaactgaagtttgaatctcagttccaggcactttcttccggtggagccatcagctatgtagaagttccggacatgaaagacaacattgcagctgtactccaggtcatccgtttcatttatgacaacattatgtatgcggaactcaatacaaagagcgattactgtcaggagtgtggatatgacggagagatccagatcataacagatgaggaaggaaagctcgtatgggagtgtccacattgcggaaaccgcaaccaggatacactgaatgttgcaagacgtacctgcggatatatcggaacgcagttctggaatcagggaagaacgcaggagatcaaggagagagttctgcatctgtagaatcacaattgtatttgtaacaggaattttgtgcataaccaaaaaaaattttttaacaaaaaagctcgaaaatgtacataatgaactttaaaacctaaaaacagatatttagaaaaagtatcaaaaatgtacataattagctttaaaacttaaaaatagaaatcactaaaatcattagaaaatgtacataataaaaaggaatcagattatgattcctttttattttacactttaaaattaaaatagtcgcttcttgcgtcttcgtcccttacaataaggacagctttcacgatgacgtttcttgtataaaatcttttcagaaacacttaattcatagacgtgatcaggattacgcttgcaaatccaccagacgttagttgaatatttttctgtaatctcatcaggattaactaatacataattgttaatccaattccattcattcattagatcgggatgaagtgccgcgaaggatgttttgccagggataacttttcgacctgaacaatacggacagtcagcatctccatttaccatatcaatgatttcagcattgtaatcgttatggcaagtagggcaagtccaagcaccagatctgtgattgggtcggacttcatccgcagttaattcattttggtcactccataaagtagcaatgtcagggtatttagcaaaagaattcatgctgtatgctattggaagaaatataaataaatatcatcgttttttatacgaaaaactgagaaaatttgaaggaaaaactgcctagaaaaaaatgcggctgaaaaaatccaaacaaggattttttgcggccaaaaacagaaagtatttatcaaaataaaaatatcctgaacaagttgcagagccagaaagctctgtaactgtcaggatatttttgtttggtgctgtcagctctaaaaaacgttatttaccgacagctccctgttttgttttaatgatatttatgcatccgtacataatagctgatgcataagatcacagtggctccgctccatgctgcaatctctgcaaagaaaataccgtcctgtccgataaaatggggaaggattagtgcagcactgatacgcatgacaaattcagccataccacttaccataggcattaaggtatctcccagcccctgaagtacagatctgtacacgtacaggaagtacaaaacccagagcatggcagccataatagaaaggtatttaaaagcaattgccaatacctgctgtgtctgctgcggttcacctgagatgaaaagtgagagaatattttttccaaataaaaacatggcagcagaaatgatcagtgaggtaagcaggcaaagcagcatactgctgcggacgccttttctgatcctgtcaatctttccggctcccagattctgacccacataggtaacgatggcatatccataggaaatagcagccatttccagcagaccataaagcttgtttgtagctgtaaatcctgctacaaaaaggaaaccgtagccattgatcacatactggactaccagaccgcccacaccgatgatgatattctgaaatacaacaggaataccaagcttcatcaggcgggcattcatgccggaggcaggcataaaatctgctctggtcagatgaacgatatcaattctgcgtaaaatcaggaaacagtaaacagcggagaagctctgtgcaatcacagttgcgattgctgctcctgccacaccccatccgaagcctgccacaaaaaggatgtccagtgagacattcagcacagatgcgatgatcattgcggtcagcggtgttttactgtttcccatagcccttagagcagaggcaaacatattataggctgctgtggcggggattccacagaaaatgatgcgcagatataacagagacattccgataatattggaaggtgtatgcagccctgttaataccagcgaagcaaatgactggctgagaatcaatactccggctgcgatgaatgcggtcagccggtaactgtgagccagagatttacgcagattttcgaaatcctttgccccataatactgggagagttgaatagaaaatccctgagtgagtcctgtggatattcctgtgacaacccacatcagaaagtcaacagcacccagtgcggcaagagcctccacacctgcaacctggccaacaaccatggtatccaccattgtataaagctgctgacagatatttcccagcatcaggggaattgcaaaaagaatgatcaaccgtcccggtgaaccggaggtcatatcctgaatcttggttttcattagtataaaagttcctttccagagcatatttgaaaaagtttagaaatgattattcgaatatgccctgatatttacattgataattttacatcattaacgtgaaaaataaaatataatatttcatcagaatgatataaatttatcaatacctgctataagcagcatgttgttgaaattattatgcatagcgcctgagaggggtttttgattgctattttttaaaatacagatatataatagaatctggatttgcctttatagttgttgaagtgcctgtatccatcatgtaattacaatcttttgacttgctgatatcaaaagaacttaaatctaagtatttcaaactagaacaattactaaacatacatctcatatctgtaacattacttgtttcaaaatattttagatttatttctttcaatgaagaacagttataaaacataaagtacatatcttcacatttatctgtatacagattttcaatatttttcacttctactaaatttgtaaaaccataaaaccaatttctacacgatataggtcttattttttctgcaaatttgacactctttactaattttgaatcaaatgaaccatctcttgctaatccattactacgaacatttattgatttttcttttaaaagtgcatcagttggtgctgttattttattcttagatattacaagttcattatttttattaatataaatccaaacatacagatctactgttgttggtggttttggacgtcctgttgttgccacatatacttcatcacttcctaatttggtaatcttctggaacggcagttcaatttgccccccgaagtaacgcagctgccccgatcatgatcgcgatcacaatagaaacaacaacgatcttgccgtattcttccaacattgatttcataaataaattctcctttcaactatcaacttgctaccatttccaatctaattattttgttctatctctgatcattgtatctatcctaactttcgcattatattccttatattaatatggaagataatcgaacaagaaaaagagtatgttgtaggatttgatatttctgaaaagattacatttttttgcaaagagaatgaacataatattctctttattgtagtaggtgaaaaataaacattatgaagtggaatcataaagtttattttgcaataaagtctaattaaaaaaatagtgaactttatacgtaaacccttgtgggtgctgacttttgtagcaaaattgatatagttcacgatttttaagttatgtaaaaatggagcttgacgactaatcgtcaggctctttttaaacaaacataatatgatgatacggatgtaaagtttcagcaagtcaatgagtgccatccctagagtttggacttttttaaagcccaaactccttcaataattttttctgatattctcggtctgcagctgctttgagaatctcatcagttctgttaagttcggacaatttcaaaatcagttgattgatcctgttttctccaagagattccccttcttttatgccctcttttatcccttcttctcttttttcatctaattcatctttcattaattctaataacgcattacacatatctcgtttcccctcctttagccgattctcgtttgcttttactatgatctccataacagcctgatacagctgattctctttgttctttttataatcctctaaaagctgtctggtaacagacatgtcttccagtgtatctgtcaaactatataaccaaagatttttctccggcgataatcgatttgttacaagaatctgaatcggtaagatatctccaattacataataaatcccttcttccggattatcaatagtgtagtggcgtacttctttcaaatgtcggatcagttctcttggatatcgttttgatactaaggtgatcgtcagctcctgaatcggaatttcatttaccttccctgtatctgctttataaaaatttgtatatccatataccttatagaaatcgtccacggaaagggaatcggatggtgatttatattcgatgatattatacttacggaatattttcccaatatttttatggataggttccgcatccttctttttaatgatcaacacatcaattgccattggctttgaacttaatagatactcccgttcaaattttaatttttctttttcttctctgaattcaatctgcaagtctgcataaaatgcaggatgccactgaagcagcttttcatctgccggttgctgttcttccggcaattgctttctcttttgtttcatctaagagacctccttatgtgatttttcacagaagttatcccttcatcagaaaacctctgctttaaataatggattttaaaagcatgaattttctgatttgacaggtgtattctacctgtaatgaaaccttttatatgaatttagatgttttagaaaatatgctttgaaacaggataacatatttatgtacaatattcaatgcttttcgataatgaactgttacttctaagcagcatcacttaagatagcaaaagatgaaaagatatggtatgatagggataaatggaaagaaaattccaatcaatgctatgatacaaaatgtattttggaataagtggaaaagaggattcaaagtgaactacggagaaatcaaaaaatgtgatattgcaaatggagagggtgttcgtgttgcccttttcgtgtcaggctgcaggcatcattgtaagggatgttttaacagtatgacatgggattttaattatggaaagaaatttacgaaagaaacagaagaagagattctggaagcgttgaagccgaattatattgatggactgtcattgcttggtggcgaaccattcgaaccggagaatcaggaagtgcttgtgaagcttttaagaaaagtgaaggaacgttatccggagaagaatatctggtgttacagcggttatttgttcgatgaggaactgaagaaagaaagcagggcgagatgtgagtatacggatgagatgctttctatgctggacgtacttgtggatggaagatttgaggaagataagaaaaatattacattgttgttcagaggttcggaaaatcagcgtttgatcgatgtgaagaaatcactggaacaagacaaggttgtagaatggaaaccggcaataaaaagaggactttaagcggaaaaaagccttgacttatattcgcatagtttttataatgaataggtatattgtaaaaacgcagatgaggagtagtagaaggaaaagatgcctttcagagagctgtcggcaggtgtgagacagcagcacagactttgaactgacctcggagttctttcggtgaaaagatattatattgattagccggaggcgggagttcccgttatagaatgaatgagtgcatttgactttgtgtcagatgaataagagtggtaccacggaattaaagccttttcgtctcttggatatatgagaagaagaggcttttctttatattgatgaaagagaggaattaagtacatgggtacaaagattgtttacaatcacaaagccattgagaaaaaatggcgtgagaaatgggaagagacaccggtcaatccaagaaacggaaaagacggaaacaagaaaccgaaatattactgcctggatatgttcccgtatccatcaggaaatggtcttcatgtaggacattggagaggatatgtaatctctgatgtatggagccgttataaattacagcagggatactacatcgttcatccaatgggatgggatgcattcggtcttccggctgagaactatgcgatcaagatgggcgttcacccggcaaaatcaacagaggcgaacatcacgaacattaagagacagatcaatgatatcgcagcactgtatgactgggatatggaagtgaatacaacagatcctgagttctacaagtggacacagtggatctttgttaagatgttcaaggaaggtcttgcttatgaaaaagagttcccgatcaactggtgcccgtcctgtaagacaggtcttgcgaacgaagaggttgtgaatggtaaatgtgagcgttgtggtgcagaggttacaaagaagaaccttcgtcagtggatgcttcgtattacaaaatatgcagatcgtctgttgaatgaccttgataaacttgactggccggagaaagttaagaagatgcaggctgactggatcggaaaatcttacggtgcagaagttgacttcccggtagaaggaagagatgagaagatcactgtttatacaacaagaccggatacactccacggagctacatttatggtacttgctcctgagcacgaactggcagcatctctcgcaacagatgagacaagagatgcagtagagaaatatatttatgatgcatctatgaagtccaatgttgaccgtatgcaggacaaagagaagacaggagttttcacaggaagctatgcgatcaacccactgaatggagcaaagacaccgatctggctgtctgattatgtactggctgactacggtacaggagcaatcatgtgtgtacctgcacatgacgaccgtgacttcgagttcgcaacaaaattcaatattccgatcattcaggttatcgcaaaagacggagaagagatcgagaatatgactgaggcatatacagatgcagtcggaacaatgatcaactccggtgagtggaacggtatggagtcttctgtgcttaagaaagaagctccacatatgatcgaagagatgggaatcggacgcgcaacagtaaactacaagctgcgtgactgggtattctcccgtcagcgttactggggagagccaatcccgatcattcactgtccgaagtgtggaaatgttccggtaccggaagaagaacttccacttcgtctgccagaggtagattcctacgagccaacaggaacaggtgagtcaccacttgctgcaatcgatgagtgggtaaactgcaagtgtccggtttgtggaagtgattccaagagagagactaacacaatgccacagtgggcaggatcctcctggtatttcctgcgttatgtagataaccacaattcagaagcacttgtttccagagaaaaagcagacgagatgcttccggtagatatgtacatcggtggtgtagaacatgctgtacttcaccttctgtactccagattctatacaaaattcctgtgcgatatcggggcaatcgactttgatgagccattccacaaactgttcaatcagggtatgatcacaggtaaaaacggaattaagatgagtaagtccaaaggaaatgttgtatcaccggatgacctcgtacgtgattacggatgtgactctctgagaatgtatgaactcttcgtaggaccaccggagctggatgcagagtgggatgaccgtggaattgacggcgtaaaccgtttcctgaaacgtctttggaatatccttatggaaagcaaggagaaggatgttcagcctacaaaagagatgattaaacttcgtcacagaatggtttatgacatcacaacaagacttgaaagcttcagcctgaatacagttatctccggattcatggagtacaataacaagttcatggaaattgcaaagaaagagggcggaatcgacaaagagacactcgagacaatcgcagtacttctttctccatttgcaccgcactttgcagaagagatgtgggagcagcttggacatgaagagacaatcttcaatgcaggatggccaaaatatgatgagaacgagatgaaagatgatgagatcaagattccggttcagatcaacggtaagacaaaggctgtaatcgagatcccggcagatatctccaaagatgatgcaatcgcagcaggtaaagaggcaatcgctgataagctgacaggaaatgtgatcaaggagatctatgttccgaagaagattatcaatattgtaatgaaataattcaaaataatgagaaatggcgcagatgatagagatattgtctgcgttattttttgttgttggattttatgatttcatagttcttaatataattttgatacgtaaaaatacgttgacgcacgtatttttacgtagtaatatataaatatgataaggaaaggagacacaaaagatgccaatgagctcgaaggagatgctaaaactcctgaaagaaaatggatttgaagtaatcagtcagaatggttcgcatgtaaaaatgaagaatctgaaaactgataagacagtaattgttccttatcactccaaggacttgaaaaaaggattggagcaggcaatacttaaacaggcagggcttagatagtcctgtcgcttgaaagagaggttatttgatgaagaatagattattttatccagctgtttttcataaagcagaagaaggcggtttctgggttagctttcccgattttcctgaatgcatgacacagggcgatagcatggatgaagcatatgaaatggcgatagatgcattaggtttgtcattgtccagtatagaagatgaaggaactgatatcccaaaagcatcagaatttgaaacggtggatcctgaagatgggattctggtaattatagaatttgatatggcagagtatcggagaaagcacagatcaaaggctgtaaaaaagacgctcagtattccagaatggttaaatgaagcggctgttcgagagaatcttaacttctctcagattcttcaagaagctcttatggtgaaattaggggtaaatggaagattgcggtaatatgtctaaaaattgttcctaagtcctctatgtatcatcagatccttggatgttccataagatcaaatgcggagttatgaatcagataatcataagcagctgcaatctcttccggggtatatgtgatatcatgtatgatcgcatattttacagaatctgcgagcccaaaggtataaaatcgcgcaattgtctcgcgactgagtatctggagcttcgcaggtgatttcaatggatatttgtttaataatgtaagcaatgtatcataaataaattggaacatcagatgatcgaaggagttaggaccttcgatcaaataaagtctcttataaaattctttgtctttagaaagacaggtgaaaagaagacggagaagatcgtcttccatgtcattttcaatcagtacccggattttatctttgatttcttttttgaggatatattcgatgatttcgtatttgtcctgaaaatgtttataaaaagttggacggatcacatcagctccgtcggtgatcatcttaactgtaatcttttcaaaaggcatcttcataataagttctttgaaagagagtgccagcaaattttttgtcagttcttttttcacttctgtcatttgttcaaatcctttctacaatggaaatattataccataaaaaagagaatgtgattaaaaaagtttctaagattgacaattctttaacatgacttttcaagaacatagtgttgaaatttcttgatatttcggatacatttcacacaatttgtagccaaaaaagaacaacaaaaagaaaatgttcaaactacagcacatttggaaaaaactgaatcttacatgaaaaaaaggaaaatgctagattatgagataatagtttatacttaagaaaggttccttgaaaagtaaggaaaaggtgaaaaaaatggcaggattaaaatttcaggcagaaagagcagcatttagtttggcagcagataaagtacttaaatatatgaacaagacagatgatagaacgaaagcacttcttaagcttgtagatcttacagaaaattttgcaaaagatcgtttccagccagggtcttatgaagctgcaagaaagatgattcaggatccggacaataaatgggttcagtatttgaacagactttttgatgaagtggatccgcatgtccttaagacaacagcattgaatcttggatttgatgcaatgctttacggaacaaagttaatgcatgagtcacgtgaaaaatatcagtgtaatattccatggctgatcctgatggatccaaccagcgcatgtaatctgaaatgtaccggatgctgggcagcagagtacggacatcttctgaacctttcttttgaagatatggatcgtgtgatcacacaaggaaaagaacttggaatttatctctatatgctgacaggcggagagcctctcgtgagaaagaaagatgtcatccgtttatgcgagaaacacaacgattgtgtattccatgcttttacaaacggaacacttgtagatgatgagttctgccaggagatgcagcgggttggtaatctgtcattgtccataagtctggaaggatatgaggaagtcaacgacggccgccgtggaaaaggcgtttatcagaaggttatgcatgcaatggatcttttgaaaacatacggattgatctttggaacatcaatctgctatacacgcgctaatattgatacagtaacatccgacaaattccttgatatgattattgaaaaaggatgtcgttatgcatggtatttccattatatgccggttggaaatgatgcagcactggatctgcttccaacaaaagagcagagagaatacatgtatcaccgcatccgtgagatccgtggattgacaggtggaaaacagctctttgcattcgatttccagaatgatggagagtttgtaggaggatgtattgccggcggaagaaattacttccatattaatgcaaatggagatgcagagccatgtgtatttgttcattattcaagcgcaaatattaaagaagtaagcgttcttgatgcattacgccagccactgtttatggcttaccataacaatcagccatttaacaacaatcatctgcgcccgtgcccaatgctcgaaaatccagaaaaactgcagcagatggtacacgaaaccggcgcaaaatcaacagacctccagtccccggaaactgtagaacacctttgcggaaaatgcgaacattacgccaaagagtggaaaacaaaagccgacgaactttggggtgagagataattaaagtaagagccagaacaggcaccacacacggtaactgttctggctcttatgtttcatattaattgcttgaatccaagttcaacaaattcctcttacttcttctgtgattctacttcctgcattttcatagcacgaactttcagaggaagtccgaacaggttgatgaatccgtcagcgtcatgatgatcatacagatctcctgttgtgaagcttgcaagggattcgctgtacagtgagtatggagatgtctctccggcacggatgatatttcctttatagagacggaacttaacttctcctgttacatactgctgtgtaacatcaacaaatgcctggattgcttcacgaagtggtgtataccattttccttcgtatacgatctgagcaaatttatttccaagatctttcttaacttcatatgtagcacggtcaagaacgagctcttcgagctgatcgtgtgcagccataaggattgttccgccaggagtctcataaacaccacgggacttcattccaacaacacggttctcaacgatatcgatgattccgattccgtgttttccaccgagacggttcagctctgtgatgatttcagaaactttcatctcttttccgtttacactcttaggaacaccggcttcaaatgtcattgtaacgtattcatctttgtctggtgctttctctggtgttgtgctcagcacgagaagatcatcgtagtttggctcatttgccggattctcaagttcaagtccttcatggctgatgtgccacaggttacggtcacggctgtagctgtgctttgcgtcaaatggaagatcaattccatgagctttacagtaatcaatttcgtcttcacgggactgcattgtccatacatctgtcatacgccatggagcgatgatcttgatgtccggagcaagagctttgataccaagctcgaaacggatctggtcatttccttttcctgttgcaccatggcagatagcaacagcgccttctttacgtgcaatctcaaccagtttcttagcgattgccggacgagccatggaagttccgagaaggtatttgttctcataaacagctccggcctttatgcaaggaacgatgaagtcatcacagaattcatcaatgatattttcaatatataatttagaagctccggaaagttttgctctttcatccagtccgtccagttcttctccctgtccacaatcgatgcaacagcagataacgtcatagttaaatgtttctttcagccacgggataattgctgtagtatcaagaccacctgaatatgctaatacaactttttctttactcattttattgcctcctaaatgtattttatcaatttctgtttctcagtttcttgagttctaaagatttctgctttaacaagctaaaacatactatacaccacattttataattatgcaagtattattttaaaaaaatgaataaaatgcataaagacacacataataaacaaaaagaatgcataaaacaataggctataagaaaaaaatatacaagatatgatgaaaagaatgaaataagaagaaaatcaaaaaaatatttaggccaatatcatcgccttttttatatatctttatatagtaggaaaatactatatacaaacttttttgaaaaaatacttgcatattatacatggaagatgtattattatgcaagtaaagcacgggaagtgtatttttatacattcaatttcaggaaatactttacatcccgattaaagtggtatattataaggagaaatgattgcggtaacacgttaccacagtacagtaaatatgcaattcccagggaacttctattggctcccatggaaatggtaaaagaaaggacttgagaacgatgattaaggtcggaattattggagcaaccggttatgcaggcggcgagctcgtaagaatattgatgggacataaagatgcagaggttgtctggtacggatccagaagttatgtagatcagaaatatgcagatgtatatagaaacatgtttcagattgtagatgcaaaatgtatggatgataacatggatgaacttgcagagcaggtagatgtgatcttcacagcaaccccgcagggactgtgtgcatctctgatcaatgaagaaatcctttcaaagacaaagatcattgatctcagtgcagatttccgtctgaaagatgtgaaggtttacgaagagtggtataaaatcgaacacaaagcaccgcagtatattgatgaagctgtctatggattgtgcgagatcaaccgggacaaagtgaaggatgcacgtatcgtggccaatccgggatgttatacaacatgttctatcctgacagcatatccgcttgcaaaggaaggactgatcgatatgagcactctgatcatcgatgcgaagtctggaacttcaggagcaggaagaggagcaaagcttccgaatctttactgtgaagtgaatgaaaatatcaaagcatatggagtagctacacatcgccatacaccggagattgaagaacagctcggatatgcagcaggagagaaagttgtattgaactttacaccgcatttagttccaatgaatcgtggaattcttgcgacagagtatgcaaagcttacgaaaaaagttacatatgaagaagtaaaagcaatttatgataaatattatgcagatgagaaatttgttcgtgttctagagaaagatcagtgtccggagaccaaatgggtagaaggaagcaactatgtagacattggatttaagatcgacgagagaacaggacggatcattatgatgggagctattgataaccttgtaaaaggtgccgcaggacaggcggttcagaatatgaatctgctgtttggtcttccggagagtgaaggacttgaacttgttccgatgttcccataagatatataaatatagaagcaacaaagttgctaaatcacataatagtgaggacaacagtgagataaagggttgctggtcgcacatcgtgtgaacagtaacgataaaggtggtatgtatgatacgtgtaatgacaatagaggattatgatgaagtatataaattgtggaagaagatccggggattcggaattcgcagtatcgatgattcgaaagaaggtgtcgaacgttttctgcgacggaatccgacaacgagttttgtcgcagtgaaagaaggaaaaatcgtcggaagtattctctgtggtcatgatggaagacaaggaagtctctatcatgtatgtgtgaatgaggcataccgaagacatggaatcggaaaagacatggtcgtgcatagcatgaaagctcttcaggaagagaaaattaataaagtctgcctgatcgcatttgcacagaataatgtaggaaatgcattttggaatacaatcggatggacggaacgacttgatgtgaattattatgattttattttaaatgaagaaaatattacagcatttaatgaacagtaggaaggaagcagatcatatgaagattatcgaaggcggagttaccgcagcaaaaggatttgaagcagcagcaacagcagcaggaatcaaataccagggacgtacagatatggcgatcatttacagtgagaaaccgtgtaaagtcgccggaacatttacaacgaatgtagtaaaggcagctccggtgaagtgggacagacagattgtagagagcaaacagaaatcacaggcagttattgtaaactccggaattgcaaatgcgtgtaccggagaggaaggtatgaaatactgtgaagagacagcaaaagaggcaggaaaagttcttggaatcgatgagaaaggtgttcttgtaggttctacaggagtcatcggaatgcagatcccaatcgataagatcaaagccggaattacagaacttgccaagggaaagaaagctgatctggcaagtggaacagaagctgcaaaagcaatcatgacaactgatacgaagaaaaaagaagttgcggttacatttatggcaggagatacagaagtaacgatcggaggaatggcgaaaggttccggaatgattcatccgaatatgtgtacaatgcttgcatttattacaacggatgcaaaaatttccaaaaaagcacttcaggcggcaatgagcagtgatgttgaggatacttataacatgatctctgttgacggagatacttcaacaaatgatacagcacttcttctcgcgaatggaatggccggaaatgagaaaatcaaagaaggcacaccggaattcgatgcatttaaagaggctcttcattatgtaaatgagacacttgcgaaggcaatggcgggagacggagaaggtgcaacagcactttttgaagtaaaggttgtcggagcacagacaaaagagcaggcaaaagttcttgcaaaatctgttgtatgctcgaatcttacaaaggctgcaatcgcaggacacgatgcaaactggggaagaatcctttgtgcaatgggatattccggagcgcagtttgatccggagcaggtagatcttttcttcgagagccgtgcaggaaagcttcagatcattgctaatggaacagcaacagattatagcgaagaaaaggcaacagagattctttcacaggaaaaagtgacagccattgctgacttaaaagccggagatgcagaagctactgcgtggggctgtgacctgacacatggatacattgatatcaatgcggattacagaagttgatttatagagaaattattatttctttaaagacgctgaaaagataaaaaagggagacagaaaaaatgacaagcaatatgcagaaatatctggataaagcgcaggtgctgatcgaggcactgccttatatccagcgctttaaccgtaaaatcatcgtagtaaaatatggcggaagtgccatggtggatgaaagtctgaaacgcagagtaatcgaggatgttacacttctgaaactgtgtggattcaaaccgatcatcgtgcatggcggtggtaaggaaatcagcaagtgggttggaaaagtcggaaaagaagcagagtttatcaacggacttcgagtgacagatgcagagacaatggagattgctgagatggttctgggacgcgtgaataagagtcttgtacagcttgtagagagtcttggcgtgcgtgcgatcggaatcagtggaaaggatggaaatcttctccaggttgagaagaagttttcagacggacaggatatcggattcgtaggtgatgtcaagaaagtaaatgcagagattttgtatgaccttctggaaaaagatttccttccgatcatttgcccggttggtatggatgaggaatacaatacttataatatcaatgctgatgatgcagcttgcgcaatcgcccgtgcaatgaaagttgagaagcttgcattcctgacagatattgaaggtgtttataaagatccaaaagatccttctacattgatttctgaactggaggtcaaagaagccaaggaattgattgctgacggatatattggaggtggaatgcttccaaagcttcagaattgtattgatgcgattgaaagtggtgtatcccgtgttcatattctggatggaagaatcccacattgtctgttgcttgaaatctttacaaacaaaggaatcggtacagcaattttaaatcagaaagaaagcaggtattatgatggtgaacagtaaaatacaggcggcagaagagaacctgatccatgtatacaatcgatttccgattgcactggatcacggagaaggaatgtatctgtatgatacagaaggaaaagaatatcttgactttgcagcaggatttgctgtgtcaggacttggatatgataataaagaactgaatcaggcattaaaagatcagattgataagttataccatacatcaaatctttatttccatgagagctgtggagaggcagcaaaagaattaaaccgcatttccggaatggacagagttttctttacaaacagtggcggagaggcaaatgaaggtgctctgaaagcggcaagaagatatgcttacacaaagaagacaggaagatatgaatttatagcgatgcagaattctttccatggaagaagcttcggagcagtttctgtgacaggacatgattcttatcgtgaaccgtttgagccggttgttccaggtgtaagatttgcagagtttaatgatcttgacagtgtgaaagcactggtaaatgataagacttgtgcaattattttggaaccgctgcagggcgaaggcggaatcaatcttgcaacacaggaatttatggaaggaatccgtaagatctgtgatgaaaatggaattctgatgatctgtgatgaagtgcagtgcggaatgggaagaaccggaaatatgtttgcatggcagggatttggtgtaaaaccggatattttgactatggcgaaagcaatcggaaacggaattccggtcggtgcatttgcaatgacagaagaagtggcaaaatattctctgcagccgggagatcacggcgcaacttatggaggaaatccactggcatgtacagctgttaagacagtgatcgagatttttgaacgtgaagatattgtaggacatgtaaatcaggttgctccatatctgacaaaaaaactggatgagcttgtggatgagctggactgtgttgtcaaaagaaaaggaaaaggtctgatgcagggaatcgagattacaaaacctcttgcagaagtaaataaaaagacaattgaagaaggacttctgattattcaggctcagggaaatgtgatccgttttgttccaccgctgatcgtagaagaaaagcatattgatgagatgatcgaaaaactgaaacgtgcacttgcataagaaatcttatacataaaaaagccggcatttgcttatactatttctatagggaggtatgagcttatggccggttttttgattgcactgctatcaggtgcgctgatgagtgtacagggagtgttcaacgcgcaggtgacaaagacgacaggaatctgggtaagcaatgggtgggtgcaactttcagcatttcttttgtgtctgtttgtctggctggcaacaggaagagactctgttgcagcacttatggaagtccaaccgcgctatatgttgttgggaggtgtgatcggagcagggatcacatggactgtcattaaaagtgtggatgctctgggacctgcaagatcagcacttttcattgttgtttcccagctggcggttgcttatctgatctcactatccggaatgttcggaatggaaaaagaaccattttcatggagaaaactgattggattgttgatcgcagccggtggaattgttcttttccaatggaaatagaaagttttgcgggtattgtaacaagtctgtaacaaagcgttaaattgtctattgtatttttgagaaaaattcgttacaatatttatgtccggttttaaggggaagtctgactgtctgagaacagtgaggcaataggatgaagaacggatggaagaaaatatgcagatgccgtaaagggcagatgctaaaaggaattgtattgactttaactttggcttttttgaccatgggattgtgtggctgtgcagagaagcatgacgcagcggaagaacttgaagagttcacactggagggagaatctgatgtaggaaagaattcccaaaattccaaaacagagtcagaaaaaggatctcagggtggcacagatgcagaagaaggactgccggagacgttatatgttcatgtatgtggagctgtgaatgctccgggggtgtacgaactgaggacagatgcacggatttacgaagcattggaagcggccggtggaatgacagaagatgctgctgcagattggatcaatcaggcagaagctttgagtgatggagagcggatctatgtgccaacgcaggaagaagcagaggagtcagcacaatctgtttccggtcagtgggcagatccgaatggaaatgcaggtggatcagtcagtgataaaattaatataaatacagccgcaaaagaagaattgatgaccttgagtggaatcggagcatcaaaggcagagagtattctgaagtacaggcaggagcatggaaactttcagagtatagaggatctcaagaagatcgagggaatcaaggatggcgtatttaataagataaaagacgatattacggtataggagcgggcaggcagaagaacggccagaaagaggagtatgagcaagaagatattagttgttgatgatgaaaaattaatcgtaaaggggattcggttcagtctggaacaggaaggaatggaagtggattgcgcttatgatggagaagaagcattagaatatgcgagaagatgtgagtatgatcttgtacttcttgatgtcatgcttccgaaactggatggtttccaggtatgtcagcagattcgtgaattttcagatatgccgattgttatgttgactgccaagagtgaggatatggataagatccttggtctggaatatggtgcggatgattatatcacaaagccgttcaatattcttgaagtgaaggcaagaatcaaggcaatcatgcgcaggacagcgaaacgcaaggaagaaccggccggcagtccggtgcttgtgaaagggaatatgaagattgattgcgaaggacgccgtgttttcatcggggaacgtgagatcaatcttacagcgaaggaatttgatgtgcttgagcttctggcgatgaatccgaataaggtttacagtagagagaatctgctgaatctgatctggggatatgattatccgggtgatgcaagaactgtagatgtacatatccgtcgtttacgagagaagatagaacagaatccaagtgaaccaaaatacgtacatacgaagtggggagtgggttattatttccaggggtaagaatacattttcatttaagaaaaagatctttaacaatcttagattccgaatttttattatagtgcttcttgccgggcttgtgcccagcgtagtagcactatttggaatcgtaaaagtctatgagtcacgtgctgtgtcacttcgaacagcagaaattcagaatcaatgtacaattttaacgaatcagatcagtgcgagccattattttgaggacacctcacaagaggtggtcaatgacagcctgaatcagctgactaacatttataacggaagagttatggtaattgacgatcagctgagggtagtcaaggatacttacagtctggatgagggaaagctggatgtatctgaaagtgtagtgcgctgtatgaaggggacgagcacgaataattatgataagaagaatcattatatcgaggtgactgcaccgattgcaatacccggagaggatcagattcgcggtgtaatgctggcaagtgtttcaactgatagtattgaggattctctggatgtattatatacacaggggagcgtgattattggtcttgtgatgatttttctgacgattgttgcagtgtttgcagcagatcgtgtagtacgtccgctgcatcagattgcagctacgatcgagaatgtaagtgcagggtatagcgacgatgttttgcatgtggatacatttacagaaacgaaaagtatcagcgaagcaattaataagatgatgggaaggctgaagcttttggatgattccagggaagaatttgtatccaatgtatctcacgaactgaagaccccgatgacatcgatgaaagtactggccgattcacttctggagcaggagaaccttccggttgagatgtatcaggaattcatgggtgatattgcaaaagagattgaccgtgagaataagatcattacagatcttttatcacttgtgaagatggacaagaaggggcagacgctgaatattgaatccattaatatcaatgaacttctggaacagattttgaagagattaaaaccaattgcagagaaaaagaatgtggagatcgtaatggagagctttcgtccggttacggcggagattgatgagacaaagctgtcacttgcgatttccaatctggtagaaaatgcagtaaagtataatcatgataatggatgggttcatgtatcattgaatgcagaccacaaatttttctatgtaaaagtagaagattcaggaattggaattccgaaagaggatcaggcgcatgtttttgaacgtttcttccgtgtggataaatctcattccagagagatcggaggaacaggacttggacttgcaattgcgcgaaatgctgtgattgcacatagaggtgcgattaaagtattcagtgaagaaggcgaaggaacaacatttactgtgagaattccattgatctatacagcttcttaggagaaaagttatgaaaaaaagaaaagggatcgcagtgttgcttattctgattctttctctcgcagtaactgcgtgtgggaatcgttatggagtaaaggaaggcgaatcttacatttactgtatgaatacagacaagacaggacttgtaaaggttgcggctaagatcagcggcaattctgcgataaaaaaggcggaatctgtaatcgatgagatgaagaaaccaacgaatgaaattgaatatacacaggcaattccggaacaggtgaaattgctcgactgtgctttaaagggcagtatccttgagattaatttcagcgaagaatattatgaagtgaaatccttagatgagaaactgatgcgggcagcaatcgtgcagtcactgcttcagattgacggaattgatgcggtatctgtccgtgtggaaggagaaccactcaaagacgatgaaggaaatgaggtcggtctgatgaatgaggacgatattgttgacacgacaggttcttcgttaagttcttatcagagtgatacattgaagttatattttgcagatcagaatggatccaaactggtcaaacaagaggttgatgttcattacagcagtaatgttttgaaagaaaagctgattgtagaaaagctgatgcaaggtccatctgaggagggggcatatccaacgatcaatccggcggctaatctgttgagtgtaacgacaaaggatggaatctgttatgtgaattttgacagcacatttctgatcagtgcgtatgatgtactgcctgagatcacgatttattctattgtggattctcttgtagagggaacaggagtaaggcaggtacagattacgatcaatggtgaatcgaatgcaaaatacatggagaaggtggacttgtcacagccattgaatgaagagcaggactggatagcagcagataacaaagaatgagaaaacgcccgctctgtatggtatgtcttatactgcttgccatacagattgtaagagtgagttttttacagaatacaaaagatcagaaaccgtcccttgcagaaacattgatttcggatgagaaaaatgtgatttgcgagggcacggtttatagaattgaaaataaatcacaatcaactgcaatttatctgaaagatgcggttgtttcttgtacagaccaaaagagtaagaatcagataatcaaagaaaagaaaatccttgtaacaataaaaaataataaatccggtaaaaaaatcagaatgaaaataggacagaagctgaatgtgtgggggaaaaaacagtcgtttcatccgtcaaggaatccgggtaattttaaccaaaaaagttattatcaaaaacagggaatccatgttggggttttaacaaaggcagaacaggttgagatagttttgtctgaaaaagacaagaactggattgtatcacgatggaatagcatacggaatcagctggaccggctgaaaaattactggaactggaagattgtaagccagatgggaaaaacacatggcgcgatgctttctgcaatcttgttgggagaaaagagcggacttgatccggagatgaaaaaattgtatcagaagaacggattaggacatctgcttgcaatttcgggattacacatgtcactgatcggaatgtctgtttaccggttattaagaaaaatgggaaattcatttctgttttccggaattgccggaggagggattctgtttttttatttggttatgacaggtccacaggtatccagtcttcgtgcacttcttatgttttttatccgcatgggggcagaaattaccgggagagatgtggatcaacctacaagcctggcggttacagcagctatcttaagcatatatcaaccgctgtatctgttagatgcagcatttttactttcgtttggtgcaattcttgggattttattattgtatccaatttttgaacagaaaacacgtttgaaagcatgggaaggatttaagattagtttagctgttaatggaatgcttctgggaatcatgctgtattattattttgaggtgccgccgtatgcactcgttttgaatgttattttaattccgttgtttccatttgtgatgttgacaggtataggtggaattttgttttcagaattatcgggaaccgtaggaaaaattggattcagaagctgtgatcgcctgttgtccttctatgataaattatgtgagctgacatcagcgcttccgggcagcaggatcgtgaccggacagccagagttatggtggatgcttatttactatggtgtgctgttgtttttgtgcttcctgtttcatgcaatgaaaaataagacagataaccgaagaaaacaggcgggattttcacttcttgtttgtattgtcatagcaggatcgatctgcggatgcggaatactcaataatgattcaaaaaaccttcaggtgactgttctggatgttggacagggggactgtatttttataagagacagggaaggaaagaaaatgctggtggatggagggagcagtgatctgtcttctgtcggtacttaccggatagagccgtttctattatcgcagggggttagaaaactggagtatgtttttgtgacacatggtgatgcggatcacatcaatggaattcaggaacttctgcaaaatcagaaacagggagtggaaatcgatgcgcttgttctgccgccagaagaatatatggatgagaaattactccatcttgcagaaatagcgaaagaaaatgggacgagagtgttgacaatttatgccggagaaaaagtaggaacgtatttaaaatgcatcgctccgttgacaacgaggaaaagcgagcgtattcgtggcaaggaagaggagatgcctcgtctggaagcaggaaatgaagcatctgttgtacttgaattgaaggatggggcgtttcaaatgcttctgacaggagatttggaaggaagaggagaggaacagctggtggaaagcggagcattggaaagctgtccaatcttaaaagcaggacatcatgggtcgaagaattcgggaagtgaagaatttcttcagattgtgaaacccagattaacattaatctcagcggggatagagaaccgctacggacatccacatgaggagacgctggaacgcctgcaggaaatcggaagtgaagtattgtccacgcaggaatgtggtgcaattacactaaggagcgatggacgaaaaataaaggttcacaagtatttataaaacaggaataggtgataaaaaggctcttgtcaaagtgttggttattcatttataatagaatagttatgaagaccttaaatgaagatttaaaatcaggacaatttaagcaggtatatcttctctgtggagaagaaggatatctgaagaaacagtataagaaccgttttgtgaaggcaatgcttccggaaggtgatacgatgaactattcgtattatgaagggaagaatacgccagtgaaagaagcaatcgatcttgcagagaccttacctttctttgcagagcgcagactgatcgtatttgagaatacgggattttttaaaactgcggcaggggcagatctggcggattatattaaggacatgccagagacaacctgttttatctttgtggaagaagagattgataagagaaataagctctataaagcagtgaaatcaaaaggatatattgcagagctgtccacgcaggatgcaggaactttgaaacgctgggttgcaggtctggtccgaaaagagcagaagcagatttcggagtctgtgatagtgtattttctggataaagttggaacagatatggaaaatatccagggagagctggagaaagtattctgttatgcactggagagggatacgatcacgaaggaagatattgatgctgtctgtgtgacgcagatcacgaatcatatttttgagatggtagatgcggttgcagccggaaatcagcagaaagcactggatctgtattatgaactgctggctttaaaagaaccgccgatgcgtattctttttctgttggtacgtcagtacaggatgcttttccatgtcaaggcacttgcaaaccaagggtatggaagaaaagagattgcgtctaaagcaggcttacatccatttgtggcaggaaagaacatggaacaggcgaagcggtttaagatgggacagctgcgccgtgtgatggaagaaggggcacagttggagcaggatgtaaagacaggattgctgacagacaatcttgcggtagaactttttattgtaaaacagtcagaaagatagatggaggtaagaagtattgtcaacaattgatcagagtcatattagaaatttttgtattatagcacatatcgatcacggtaagtctacactggcggatcgtatcattgagcagacaggacttttgactagcagagaaatgcagtcacaggttctcgataacatggatctggagagagagcgtggaatcacgatcaaagcacaggcagtccgtactgtatatcaggcggatgacggagaagagtatattttcaacttgatcgatacacctggacacgtcgatttcaactatgaggtatcccgaagcctggcggcatgcgacggagcgattcttgttgttgatgcggcacagggagttgaggcacagacgcttgcgaatgtatatctggcactcgatcatgatctggacgttatgccggttatcaacaagattgatctaccaagcgcagagccggagcgtgtaaaagaagagatagaagatgtgatcggaatcgatgcggagaatgcaccactgatttctgctaagacaggactgaatgtacatgaagttctcgagcagatcgtacagcagattccatcaccggtcggagatccggatgcaccgcttcaggcactgatctttgattccaagtacgattcttacaagggagttattgtattctgccgtatcaaggaaggtacggtcaaaaaaggtacaccgatgcttatgatggcaacaggtgcgaaagcagaagttgtagaagttggaacttttggagcgggacagttcattccatgtgacgcacttgaagcaggaatggtaggatatatcacagccagtcttaagaatgtaaaggatacccgtgtcggagatacgatcacgaatgcagagaatccttgtgcagaaccacttccgggatataagaaagtaaatccgatggtatattgcggactttatccggcagacggagcaaagtatccggacttgagagatgcacttgagaaactgcagcttaatgatgctgcgcttcagtttgaggcagagacatcggtagcacttggattcggattccgttgtggattcttaggactccttcatctggagatcattcaggaacgtctggaaagagagtacaaccttgatcttgttacaacagcaccaagtgttatttacaagatccataagacaaacggtgatgtgatcgatctgacaaatccgacaaacatgccggatcctgcagagattgaatatatggaagagcctatggtaaaggcagagatcatggtgacatccgagtacatcggagcgatcatggatctgtgtcaggaacgccgtggaatctatcagggaatggaatatattgaagagacaagagccgtgttgacatatcatctgccactcaacgagattatttatgatttctttgatgcattgaaatcaagatccagaggatacgcatcttttgattatgagatgcttggttatgtacgttccgagcttgtcaaacttgacattctgatcaacaaagaagaagtggatgctctttcctttattgtattcgaaggaagcgcttatgagcgtggaagaaagatgtgtgagaagctgaaagaagagattccaagacagcttttcgagattccgatccaggcagcagtcggaagtaagattattgcgagagagacagttaaggcaatgcgtaaggacgttcttgcgaaatgttacggcggtgatatttcacgtaagaagaaactgcttgaaaagcagaaagaaggaaagaagagaatgcgtcaggttggaaatgtagagattccacagagtgcattcatgagtgtcctgaagctggatgaaaactagataaaagaaggaaggaaaagatactgtttttatcagacagtatctttctgtatttaaagatgaaaaagagaaatttagaattatatctccatattccgttctgcgtaagaaaatgtaattattgtgattttttttcagcaagtggaacagaggaagaacaggcagcttatgtcagtgctatggtacaggagattcagagttatcaggaattatctggagagtatgaagttcagaccattttcctgggaggcggaacaccgtctcttctgacaccggaacagatagaacagatttttaatgcaatttatcatacattttcagtaaatgagaatgcagagatcacaatggaaatgaatccgggaacagttgatatcgagaaacttcatgccatgaaagcagcaggggtgaacagactgagtattggacttcagtcggcacaaaatgaagaactgaaaatgctaggaagaatccatacatttgaagaattccttgagacttggaaactgatagaacaggctggattcaaaaaccggaacatagacctcatgtccgcacttccgggacagacgatagaaagctacgaagatacactttcaaaagttctggcacttgagccggaacatatatccgcatatagtttgatattggaagaaggaacagtattttacgactggtatgaaaaaggaaaattagaccgtggcgcatggaaacttccgtctgaggaagaagaatatgcgatgggagagttgacaatactaagactcgcagaagccggaatgcatcgatatgagatttccaattatgcaaagcagggaaaagaatgcagacataatctgggatactgggacagaacggaataccttgggattggagcagggtcctcctcattgatcaaaggagagcggtttgatcatattcgagatcggaaagcatatattgaaaagattagaaatggcgagtcgattcttattgacagagaaattctttccgtggaatcgcagatggaagagttcatgtatctggggcttcgaaaagtagagggagtttcgagaacagattttcagaactgttttggaaagaatgtggatgatgtttatggaaaaattcttgataaattagaagaagaacaattgctggaatttagtggagatcgaatcagactgacgcatcgggggatggatgtcagcaattgtgtgctggcggagttcttgttttaaaggctgaaagccaaaattgtgcaaaatcaaccaaaaacagtcatgaaatttgttgattagtttgattgactatgaacgagtttgaacgtataatacaagcataaagaaaaacaatggtcagagagaaggagaatgcaaaatgatttacacagtaacatttaatccgtcattggattacattgtctctgttgaggactttaagcttggacttacgaatcgaacgagttcagagctgatccttccaggtggaaagggcatcaatgtttctacagtgcttggtaatcttggtattgagaatactgcacttggatttttagccggatttaccggaaaagagattgaaagaagactcaaggagatgggagttgcatctgattttattgagatcaatgaaggtgtatctcgaatcaacctgaagctaaaatcaatcgacggaacagagattaacggaagtggaccggtgatttctccggaagatgtagagaagctgatggagaagcttgacaaacttggagaaggtgatgttttatttctggcaggaagtattccaacatctatgccggatgacatgtatcagaagattatggcgaagcttgatggcaaaggcgtcatgatcgttgtagacgcaacgagagatctgctgttgaacgttcttgaatatcatccatttttaataaaaccgaacaatcatgaacttggagagatttttgatgtggaacttctgacaagagaatctgttgtaccatatgcaaagaaactgcaggaaaaaggagcaagaaatgttcttgtatccatggcaggagaaggtgccgttcttgtagcagaagatggaagtgtttatgatactccggcgccgaaaggggaattaaaaaacggtgttggagcaggagactctatggtagccggatttatggcaggctggatggagaaacatgaatacagacatgcattccacatgggagttgcatcaggaagtgcaagtgcattttcagagaatctggcaacaaaagaagagattgccggagtatatcaacaggttgtaaaggaggagcggtaggatgagaatcacagatttgctcgataaaagaagcattgcctttgacaagaatccggcgaataagcaggaaactttggatatggccgtggatttgatgtgtgcaagtggtaagatcaatgacacagaagcctacagaaaacaggtttacttaagagaagaggaaagcacaacaggaattggtgaaggaattgccattccacacggaaaaggtgattgcgtaagcaagccgggacttgcagcaatggtcattaaaaatggtgttgatttcgattctctggatggagatccggtaacactcttattcctgatcgcggcaccgaatacagaagataacgttcatctggaagtgcttagtaaattgtcaatgatgctaatggatgagcagttcacggaagctcttagaaatgcaacatcagcggaagaatttctttctattattgataaagccgatgacgagagagcggatattgatgagcagctggcagatacaggaaatgcagagagtgatttcaagatccttgcagtaacagcctgcccgacaggtatcgctcatacctatatggcagcagaaggaatcgagaaagctgcaaaagctgccgactgtttcgtgaaaatcgagacaagaggaagcggcggagcaaaaaatgtgctgacagaccaggaaatcgctgatgcagactgcattatcgttgcagcagatacacaggttccgatggatcgttttgacggaaagaaagtaatcatctgtcaggtatcagacggaatcagcaaggcagatgagttggtagctcaggcgaaagccggaaatgttccggtcttccacggaaacaatccggctgcagcatcttcttccgcaggaaagaaaagcggcggagtcggacatcagatttacatgcagttaatgaacggtgtttcccatatgcttccacttgttgttggtggtggtattctgatcgcgatcgcatttctgattgacggattgtgcgtagatctgaatgcacttccggctgaccagagagcaaattttggtatgatcactccggttgcggcagtatttaagcagatcggtggaacagcatttggattcatgcttccggtacttgcaggatttatcgcaatggcaatcggtgaccgaccggcgcttgcagttggtcttgtaggcggtatgatggcagcaagcggaaaatccggattcctcggagctcttgtagccggattccttgcaggatatatcattgtacttcttcgtaaagtatgcgacaagcttccggatgcactggaaaaaatcgcaccggtacttatttatccattgatcggagttctcctgatcggacttgcgatgatgtttgtaatcgagccaatcatgggtggaatcaacacgggcctgaataatgcattgacaggtatgggagattcaagtaaagtagtattaggactgattcttggaggaatgatgtccatcgatatgggtggtccattcaacaaggcagcttatgtattcggtacagcatcaatcgcagctggtaattatgatattatggcagcagttatggttgcaggaatggttccgccatgtgccatcgccctttccacactgttgtttaaggataagtttacaaaagaagaaagagatgcaggtccgacaaactttatcatgggtcttgcatttatcacagaaggagcaatcccatttgcagcatctgatccgctgcatgtacttccatcttgtatcatcggttcagcaattgccggtggaatgtcaatgctgtttggatgtacactgatggcaccacatggtggaatcttcgtattcccggttgttggaaatgcagtaatgtatcttgtttccctcgtagtaggaacagtcatctccgcagtactgcttggactccttaagaagaaagttgcataaagcaataatcatttggatgaaatgccgaataaaataatctgtcaaaaccaataaaagaaatataagaatcaggacctgaagttgtggatctggaagcggatgcttgagattcatggcttcaggttcttttttaaaaggagatactaaaatgcttacagaacaaagatatcagattatattggatttgctgaaagagaagaaaagtgtcacagcgacagaactgaaagagattttagacacatcagagtctacggtaagaagagatattactgcacttcataaagccggaaagcttatcaaggtatttggcggagcggttgcgctagaagatgaaggcactgtctctgcttatgaaccgacagttgagcagaagagcgaactctatgtggaagagaaaaggaaaatcgcgcaatatgcggcagaactgatcgaggaggaagactttatttatctcgatgcaggaacaacgacaggttatatgattgatgctcttggacataccaatgcagtttttgtgacaaatgctgtttcacatgcacagagactggcagcgaagggaatcaaagtgtttctgatcggcggagaacttaagaactctacagaggcagtgatcggtgcccaggcaatgaaaaatctgcaggaatatcattttaccaaaggattctttggagcgaatggaattacgaaaacagaaggattcacaacaccggatgcgaatgaagccctggtgaaacaaacagcgattgagagatgtaagaatcgttttgttcttgcggatcattcgaaattcggatgcatcagttctgtgacattttctgattttgtgaatgcaaagattctgacagatggctgtccggcggagtatcaggaattggattgtgtgataggggtggaagaaagctcgttaatttgagttcatttcttagtgggcaaggtgaaataaaaatggatacaagtactgaaaaacataattttccacattcgaaattagagaaagaagaggatatcttagagcagttgtgtatctggaagacacagaatatctcattagatctggaacgaatctgtcagcatttcagaatggagaaaagagatatagtggtgtgtctcaagaggatgcaaaaggaaggttatcttgaaaaattaattgcaggacaggagatacaattgacagattatgggctatctgtaggaaatgattgtatttaccggcataattcaatcagtcagatgttacagtttattggtgtaaatgaaaagacggcagaccaggatgcatgtcggattgaacacattgtaaccgatgaatctacgagagcaatctgccagtttatcaattatgaaaacatgtactatgagagaagaataagaaattcagaactgacagaccgttatgaaaaaggaaactatattttttcaatgcagatgtatagtctggagcaacgctgtcctagaaaattaaagaaggaatattattgttattccaggaatgtaattcttgaaataacaaaaaagggttattttaaattacagaaagtgagcagtctgggaaacaaaagattatggtataagaactatgataaacagtgggttttagctgaacaaggagcacaaggagaacagattccatccagagtctttgaatttattataaagccgaatgacagagtgattgagggaaaacttctgattgcatttatgccggagaatcagacagaaccggaagtgtgggactgtggacaactagaagtggaaatatggtagaggaattgagtcatgaccaggaaccagacagtagaaattaatcatctgacagtattacaaattcagtatctgacagaattggaacaactggaaaagggaagagggacaattggtgcagttgctgcaaaatgtggcgtaaaacatccaacagtaagccgattctttaaaagttgtatagaaaaaggatatctgaccgaaagtcttgaattcacggataaagggaaaaagatgctccgttggcatcagaaagtccaaaaagacgttagggagtatctggaacgcagtgggattacagaaggaatcgatgatgttctgaaaggaatgatcgaaaatattgattacagaagactggaagaacttacaaaaagccatatgcgaatcaataaagaaattcgaatgcaaaaagaacagaatcagattagaaacatagaagaacttgtggagtatggcaatcatccagttgtgatttctatcctgcagacagatgggagtcgtcgatccatggcagaaaatggattcgaacctctcgggattgtgaaacataataaaagaggctgttatctcgaattgacaatcagagaaatgcatgcggtatctcggattaatggaaaacagatgaaagggcatcttacctgtctgaaatatttgcaaggggatatgtataaaattgcagatgtaaagaacggaaggataaaaatacctttgaatgcatgtggttttcagaattttgaccatggaacgttacgtggaaatcttttgattactgtgtccagttcggttggagaagcacatatgccagagagtacagcacgattgatttttaagctgtaagtgttaaaaacgcgagaggttaacagataatagatttgataaatatgtcttaaaagaagtaatgtatgtaaaatcaggagcatatggtacttctttttttatggtataatgccgctgttttacaatttattaacaagtaaaaagaaaaaaatattgataaaaattatcaaataatatgaaaaataacgtatttataaggagagtagaaaatgaagatttcgtacttaagggtacgaaataagtggaaaaatattgacaatcagaaagagtataatatatattttaacaggataatagttatgactaacaacaaatggaagaaactaaccttgcgtgttcggaaatgacgatcattatcttataaatacagatgaaaataagtgataaaggagaggagtatggagaagaaaaataaaacgagaaaaaatcctttaaaaatagtatggattgtgcttggatttctttgcctgggacttggtacgataggaattgtacttcctatcctgccaaccgttccgttttatatggcaacactattttgctttgcaaagagttccaagaagctgcacgactggttcataggaacgaatttatataagaaacatctggacagttttgttcagaaaagagttatgacaatgggaacaaaatgcaagattatcggaatggtaacagcagttatgttgattggttttatctgcatgaagaatgtaccgattggaagaatatgtattgtaattgtgtgggtatgccacctgttatatttcttctttcgagtgaaaacgttaaaacagggagaagcgttactgaatggtgcagaagcggaataataagatgaataaaatcgaaaagaaacgacaaaaagaacaatatgtcgtagaagaaatgatccggctgtattgccgaaaaaaacatccgaaagaagaaagacaggaggggcagatgtgtccagaatgtcaaagactttcggattatgcaaaacaaagaagtcagaagtgtccatttatggaagaaaagacgttttgtgcgaattgtaaggtgcattgttataagccggagatgagagaacagatcaggcaggttatgcggttttcaggaccaaggatgctgttgtatcatccggtgcttgcagtatggcatttgatatgcagtaggaagtaaaaagaacaaaaagtaaggagttacttatgattaaaacaagactggtggggctgttgtcccatgcaaaaaagtatatcgtgtatacgattttgtggcagtgggcagccctcctgtcacaagtgttagcggtttttactatcgcagatttactggaacgtgtagtgtaccaggcagtaaccgtaccgatcattgagcggacgatactgattttagtcctggttgtggtgatccggttcgtatgtgaacggatgggagcaaggtcttcttatctggcatgtgtggatgtgaaacggattctgcgtgaaaagatttatgagaaaatgttgaagctgggagcttcctacagtgagcaagtatcctcttcggagatcgtacagatgtcaaccgaaggtgtggagcagttggagacatactttggaaaatatctcccacagttattttacagcctgatcgcaccgctgaccttgtttatcattctttgtagagtgagtctgaaagcgagcgttattctgctgatctgtgtaccattgattccaatttctatcgtggtagtacagaaagtagcgaagagattattaaataactattggagtatctataccggactgggagattcgttccttgagaatttacagggacttaccacattgaagatttatcaggcagaccagcagaaagcagacgagatggatgtggaatcccagaacttccgtaagattacgatgaaggtgctgaccatgcagctcaattcaaccagcgtgatggatattgtggcgtatggtggagctgcgatcggtatggcagtggctgtatctgaattcttaaagggaaatattagtgtagcaggaacattatgtatcgttctgcttgccagcgagtttttcctgccgctcaggctgcttggttcgttctttcatatcgcaatgaatggtatggcagcgagtgataagattttcaagattttagatttaccagaaccacaggcaggagaaaaaacactgccggatggagcgttagatattacattaaaagatgttcatttttcttatgaagaggacagagagattctaaaaggaatcaatttaaatcttccggcaggaagttttgtatcactggttggtgaatccggatgtggtaagagtacaatcgctggaatgcttgcagcaaagaaccggggatacagcggagaaatcaccatcggcggtgtaccgcttaacgaagtgaatgaaacaaatctgatgcagagggttgttctggttcgccataacagctacctgttcaaaggtacagtagaagaaaatctgaagatggcaaaaccggacgcaacgaaagaagagatggaagctgttcttcagaaagttaatctcttagggttcttgcagacacaggatggcttacagacacagctgctggaaaaagcaagcaacctgtccggcggtcagtgtcagagactggtgattgcaagagctttattaaaagaagacagcaaggtttacatttttgatgaagctgcatctaatatcgatgtggaaagtgaagaactgatcatgaatgtgattcatgatctggcaaagacaaagacggtgcttctgatttcccatagactggcaaatgttgtgaagtctgataagatttatttcttaaaagacggagaaatcaaggaaagcggaaagcatgaagaactgatgagccagaatggtgcgtacagacatctgtatgaaagtcagatggcattggaaaactatggaaaaggagaagtggcataatgagtgaaaatacgaatacaaccaaacgcagaagtgccacccagatcatgggaagtctgattggtctggtaaaacccctgctccatatcatgctggcagcaatcatccttggaacattaggttacttgtgtgcaatctttctgacgatactggcagggcaggtcatcatacatggacttctgacaggggtagccggaatgattgttccggtggacaatatgtggctggtatttaacccggtaaaaacgattatcacagtcatgatcgtaattgcagtgcttcgtggaatcctacattatatggaacagtattgtaatcattttattgcatttaagctgttggcaattatccgccacaaagtgtttgctgccttacgaaagctctgtccggcgaagctggaaggacgagataaaggaaacttgatttccattattacaaccgatattgaattactggaagtgttctatgcacataccatttcgccgattgcgattgcaacattgacttctatcattatggtgatttttattggaagatatcactggttagcaggtttgcttgcactggcagcttatcttattgtcggtgtagctatcccaatgtggaatggaaaacgtggcagtcagaagggaatggaatttagaacaaactttggagaactgaatagttttgtcctggattccctacgtggactggacgagaccattcagtatggacagggtgaaaagagaagagagcagatgagcaagcaatccaaaaatcttgcaggaatgcaggaatcattaagcaaaatggaaggctcacagcgttcatttacgaatatggttatcctgcttgcatcttttgggatgctggcattgacgatctggctgtacgacaaaggtgcgatgggattcgagggaatcttaacctgtaccatcgcaatgatgggttctttcggaccggtagtagcattatcaagtctttccaacaacctgaaccagacactggcaagtggtgagcgtgtcctttctcttctggaagagacaccacttgtggaagaaattccgggtgatgtggaaacttctggtgatcaggatgtgaattctgaggagagtgcaaatcatgcattcgcaggagcagaggcagaaaacgtaacatttgcatacggagaagaagttattttggataactattcactgaaattacagccgggtaaaatcacagggattcatggtgtgagcggttccggaaaatctacacttttaaaactgttgatgcgtttttgggatgtgcagggtggaagcatgtcggtagacggtacagatgtccgaaagattccgaccaggcatttaagagatatggaaagttatgtcacgcaggaaacacacctgttccatgattccattgcaaataatatcgcaatcgcaaagccgggagcatccagagaagagattatggaagccgcaaagaaagcgtctatccacgattttattatgacacttccgaaaggatatgatacggaagtcggagaactaggtgatacattatctggcggtgagaaacagagaatcggaattgcaagagcatttctccatgatgcaccgatgattctgatggatgagccaaccagcaatctggactcgctgaacgaaggaatcattttgaaatcattaaaagaatcggccaagaagaaaacggttgtcctggtatcccaccgagtatccacaatgaacgtggcagatgtggtatatgaaatggagaatggaagaatttcatagctaaaacatttgaaatagcatcactaaaagcggcatggtaacaatagaaaacagtgttgtaacaacattgatcgcactggcatattgagaatcatttccgtatacttgacacatctgggttacagttgaggcagatggagtaatgattgcaagaaatacaatgagcatgattttatctccatctgctgaaaaagcagcgaaatggctcaacttaatcagaatcagtgcaaatacgggtaatacgattaaccgaagaatagagataaaatatactttcttatttgtaaaaatctgtttcagatccataccggcgaaaagcatacctgttacgatcatgcttgctggtccaatcatattaccgacagaacttatcgaatcatttatgatttccggtaaatggatttttgtaaagaaaagcaggattccaataaaaatagaaatcatatttatattgagtacaatctttttccagtcataagaagcctcttggctgataattttcttacagtgagtccatataaaaatgagttgcacgctcatgaatacacatccatataatacccactcttttcccaagataaaagttacgattggtacgatcagattaccagaattagagtaatagatagaggcaatttctacttcgtttaaatgaaaaagtttccctaaaacagagacaacaataagaaggacaatctgtgtgaaaacagatgctataaaagctaacaataatcctttcacagtgtcagaagtataatcaacttgaaaagcgtttataattacacaagggatgaccagataaaggatgattttggataataccttactgtcggtatcctcgacaatacctgtttttacaattaagtatcccataaagatcataagaaaaagctgtgcaatttgtttcatgagaagtatactgatggtcataaaattatctccgtattcttgtaaagtctttcataatagaactgatttaaaccataaataagtatagtactttttcaagaaaagtaaagagcgtaagtaaaatccgtaccgcatacgaaaatgctccttgatatgttgcgcaataatccaacaattacgcaaaaagaaattattgaacgagtctctttgtcgagaagcgctgttcagagaatgattaaagagttgtctaaattaggacgattagagagagttggttcaaagaaaactggcagttggattgtaaaagagtaaaagaaaatatgttactttgaaatctccgttgttctgttgtagaatgacggagatttttcatgtataaatatggtaacagacatttttggtgcagaggatattatgtcgatacggtaggaaaaaatatttgattaaatttgtcacttttttaaattttgaaacgttttattataaaaggaattgagtaggatatcgggagaggaatgtgaaaggtatgcttgaacaagcttcagttgaggagatgtttcagaaatatggagaaatgctatataaaatatgtatcgtaatgcttgaaaatacgtatgatgcagaagatacagtgcaagatgtattaataaaatatatgacaaaaaagcctctttttgaaacttatgaacatgaaaaggcatggttaattagagttacaataaatctttgtaaagataaattgcgtttctataaacaacatccatatataaatatcgaaacaattaagactacatatcctgaggatagtatagataatcagatacttgctatccttttagaattaccatctaaatataaggaagtgcttttattatattatgtagaaggatataaatgctttgaaataagtaagattttgaaaattacggaatcgactgtgaaaaagcgtttggaacgaggtcggaaattattaaaaaagaagttgggagtgaatgagtgtggataaaaattcaattaaaagtgctgtgactggaattgaatttactgaagaatccaaacagagaatttttgatgggattgaaagaagaaaaaatttgaaacagaaaattcacataaagagaattacaacggggatagttgcaactgccatagtttttttgtgtgtgtttacaaatatcttgcaaaaaaataaatcaataattacagtttatgcgatgacgcaagatggaaatgagaaaggttctgttttaataccagaacataaagaaactttaaaattgatggaaacgccggtaggaaatggttatatttttcagatagatataccagagaattacatgtataattgcaagtcattagaaaaagaaaatagtatttttacaatttaccaaaaaggggaaaaaatatattggattcccgagtcaaatatatttgaacaaatttatagtggtgaaaatgagaagttgacaaatagtagtccaaattgtgtgaacgaatgtgaatttgaaatagtagtttacaatgaaaataaagaaatttcatatgaggaggttataaaatttgaattagtaaatggaaaatgtattgttacactaaaaaagtaaattactgtttggaaataaaaatatgttttggaggtagaatatgaaaataaaaattaaattaatggtaacttttatggcattggttttaagtatttttacagctatttctgtaagtgcagcatcagaagatccgtatcaggcagtgattgataaattgaataaagagtattcgatggatattcattttatgaactcggaagaattttgcgtatattcaatggagaaacagcaaaagatagatattacaccagaggaattcgaaaagaatttgagggaacaaattattgaaaacaatcgggctaaagctgaagctaatgaaaaatttgcagaattagaagagaaggatattattgaaagtggaagtggagtttgtaaacctacaaatacaactcgagcaacagctactgttacaaagaggtaaagcggttccaagagtaacagtatatgtggagctttgggcaggcagtggaatgtagaacaagatttatgtagaaaaaaagaattatagaaggctttgggtcatttcttctattgacccaaagccttcttcttaatcaatcccatctgtctcaataataaaccgtacttccccggtctgttcttctaacttaccgccataattatcgtattcggtgtccgcttctttgaccgctttcattcttttggagagattcttcagatcatccccgcctagtttttcaagttcctgaattccttctttatcaaagagagtaagtccttcagaaagagaagagattccttcggcaagggttgtgtatccttcttttagttctttcccggctgtgcccagtttagtagctccttgagagagcgtcgagctgccttcagacagttgattgattccctgctggaaagaggtaagtccctgagtgagctgtaaactgccggcagataaagcagaaagtgagttctgtaaagtctttaatgtctcactgagagaagaaagactctgtgctgcctcagcaaaggaaccggcaccggaagacatctggtcaagcgtagtatggcaggaagcaatcagctctgtcaggctgtttaatgttgtttccgtggcagatttcagctgatcgatatctgtggtggaagaggaaagatcaaggttctgatcaattgcagatgcaatcgtatcatttatttcattctttaactgtgacatcttatcgttgacagcatttttagattcttctgataattctgaatcggatgcagtttcagaaacaatctgatcgatcgcagactggacagcatctgtcgcagcagttttggattgttcttttgcatcttctgtgatagaagatttcagagtatcccagttgacggatgcgaaggaagattttgcctctgcaagggaggaatcaacagaatccagctgttggctgagtgatttaatctgttcttgaagtgatgaaactgtttccgcagacggaagggaacgggaatccgtgtttatctggtcagagagagctgaattcagctgttcaagaccattttgaagagaagaagcacctgaaaccagctttccggaattttcattaagtgcagttacaccgtcatctaaagtgtctgttccttcggcaagttgtgagacaccgtctacatattgcccaagataagtttgataagtagaagcaccgccaagcagctgtgctgctccgtcagcaagtttgtcggatgcatctccgagttcctgcaggctgtcagcggcatcttccatatcgtcaaaggaatcctcttccagatcttcaaacagaccggaggagaccacagttgcagtaaagtccatctcaaaatctgttacatctgcagttacttccactgattctgggatagagatatcttccgtaggttcgtaatcagtgagtttcagactgtctttaagtcccgggcaggcataaccgacaacgacgttctggtcattcattgtaaatattttaccattcgtcacctggatattagaagcggtgtcttccggaaggatcatggcggagatcactgcgaatggaaccggagaagtcatctcttcaccatttacggttacattttcttcggtagtattttcataatcaaaacgaattccaagtttgccgctttttccggagagatcttccggttgtatagattttccatccagtgtgtaactgatttttacatttacaggaagttcttctgtagaagtaccttcataatgaatgtcctcccctttgttttcccaggtgatcgttccgtcagaggactgggtgaaggactcatttcctttcgtattttttatgtctttcagagttgagaagtctttgatttcatttgatgttccgttatttttcaagtctgtctggactttgatctcatgtatcgttccgcttgcatcagcttttacatatactgtttctgatttatcagcatctgaagcagtagtagctgttttggtgtcagttgagcatccggtcagacttgtggcagaaaccaggacaagactggcacacagaccgggaactaatttttgtaatagttttcttttcacgagaaatcctcctttcaaatggtacctgcactgttatgcctaacttagaagtttgcaggttattgttcactcccgtgtcaatcactttgctgattgacacggaggatgcgtgttttggcttgaatgcatctcgccccatcaccaaaggcgatttaaaatggcgagatgcgttgctggtcgcacatcgtgtgaacagtaacgttcgcaggcagcagatacaggtacaatcacgattattcaatattttttaatgcctgatccataggtactttcttgatccggcggtattcgattaatgcaacaagcaggtaagttccgaatcctagcaggaacatttttacatacaggaccggatcaatgtacaatgggatccaaccggaaatactgctgatcataattccacggaagagagcattcatgagaactgtttcaatcggaaaactcataagcaggaagaccacgaccataatggttgtagacagcagatacagactgctgatctcccggtcagagtatccaagtatttttgtcatagagattgactgtgcattcttttcgataatgatctttgacaaaagatagatcagaatcataaagagcacgattgaaaatccgtctaacagatacatcatgcttcccatcgaaacattcaattgtcgggagattttagacagactgtcgaggtcgatcacagagccgatgtatttctggtcaatatcagtgatctcgctgtcagagagataaccactgaagtaatcggaaccaaggtcaaacagttcattgagcgtatcctgtggaagaaaaacggtcagaccaccttcataatcgtagattccttcaatagaaaatgtgtatgtatcatcttcataagcttcctttaaagtgatttcatcaccgatatccagaagatatttatctgcataagcagaagagatgtatgcaggagtcgcatcagaagcgacctctttttttgaaacatctttgtcagatacagtttcctgaaaatcaattggaagatagcggctgttgtctgcaagtccatagagaaggatttcttcttccttatattccttatcgattgttttcagtgaataagcactgaatttctcggcatcaggattatcagtttctacttcatgctgaaaatagagcatatttacaaggctctccagtttatgatcttcatccatagcattgatcggtatctgcaaaatgtactggtagttacaaagcagattatcttttagaacagtctgataatgatcgagtacagcagggaagagcagaccgaacatcaacagaaggtttgcaaataagattccgaggaacagcagaaggtaattgctgacattctggaaaatcacacgcagtcggaaacgactgaaaaatggaattcttctgctcagtgataatgcatgcttctgttgccttctctttaagtctctgcggaggaacttcaaaggagaaagtgatagtcttctgcgaagtaccgtgtaattgacgagaagcattagcaagatcggaatgatcgtagtaagcagaaatgcttctgcgttccagacggttacatatgttggaagactgtagcttccgtaatacatgccggcgcagatatctttcatgatcgtataaccgagaatgtttccaatcaaagcaccaattagcgtgacaaggattggcatggccatataatggcggatcagttcatttctggtgtagccactggcaagaagagttccgatgacattcgactcttttgcaatggtgttgctgattgtaatgccaaagacaaaagccatgattgcaattacgatataaagaaatacgatcatcattgcgcggtcgcttcccatatcatcccgggtaaatgtgattgcctggttgagataacgcggaacgaattcttccagagaaacctccttgttgattgctttcatcagatcatcagatacttctttatcttttttctctgtcgtaggttcatcattgtatttccacgcatagcagtattttacaagtggagaatctagtgattcaaatgcttcggacgttacaactccaattccgaatttgacagaatcaaacatggaatcgttgttgttctgaaaaagacagctgtaatccggaagagcaatcaatccggtaactttccaactctgtgtatcacttttcagtgtgtctccgatggaaatcttattgttgtcagcatacatacgatcgatggcgatttcatttgccgcttttggaaattctccttccatgaggcaggcaagatttacctgatcccggtttgcgaagatacgcattgtactgccatttgttaaatcttgttccagatagaaattgtcatagatccggattctattttcttccacggactgaatctgcgcatcattcattttttcagaagtacggaaatgtccgttctctgtattatatttgtcaattccttcattataagctttgatcatgctgccatcggcaacaagaaatccggagacgaatccgatggttattacaagaagaaggaaaatgacaagatatttaccaaagtctttccggaattctctggggagacgtttgtttaatggatttttcattgtctgttgcctcctttaccagtcaagatcctgggcagtgactttgtggtcattcaggtaattctttcgtaccataccgtcacgaattcggacaacatggtctgccatatccttaatcgcatcattgtgtgttaccattacaactgtattaccgtacttttgattgactgtttcaatcagcttcagtatttctttcgatgttttataatcaagcgcaccggttggctcatcacagagcagaatatccggattctttacaatcgccctgccaatggcagtacgctgttgctggccaccagagagctgattcggcagcttcttctgatgtgcagaaagaccaagggtatcaagaagttcatctacatctaacgcgtgatcacttaagtaagcaccgacttcaatattctcgcgcacggtaagatttggaatcagattatacatctggaaaacatatcctagatgcttcctccggtattgactaagacgttttactgtcattttttccatcagttcgccttcaattgtgatctgcccgctgtctgcacggtcaatgccaccgatgatattcagcaaagtggattttcctgagccggaaggtccaagaagaacacagaattctcctttttcaatcgatagatcaatgccttttaagacttccacacggctgtcaccttgtccaaaggattttttgatattggttaaggataaaaacatagtcagcctcctgtcttgtgtgagaattgagtttatcttatttcaggctcccttgtttgaaaaaaaggatagataaaactcacacatattagaaatgaatagtatacgttagctacaactaacgattataacacaaagaagatgaaaaagacactataagaaatgtaaaaaattataattatttcagatataaaaagggcttcccgatgattgaagggaggtcctttttgaaaaacggattgattattatatttcatacatgcgtgcagtcaggttcaggttgaagttgttttgccacaaaagaaagcatgctttcgagtacctggcatttattgttacagacagggcagaggatggaagatacattttcttctgattgggtcgggacggtttcttgtgataagaaaataaaatcgtataaatattcaaaaaattctttattcgttggttttctgtccatataggttctgttgaaaattatttcaagaatagttttattttccgaagtccagattgcattgaccgtgttgcggatgtttttttctacacaagaccagcttgtctcataatgggcagcaatatcgatgtacaaagctttggtaatattggatacacgagtctgatcctcgtttatcaagagtaatccatacacaatgtaatcataaccaagactagttctggcagcaataagtttatcaagtgtagatttgatttcaattacgagtgtattgtggttcatgagagtcccccttagaaagtaatatagataagaaggaagagcctgtttttgatatcatatctattatatacgtatttattatatttgtaacgataaaatttatgagtgacttaagaaatgtacaaaattatttctttttgttataatgaaaagaaaataatagcggtgttcgacaccgaggggagaacgcatggaaaaagcaaaagtaatagaattaaaagaaacaattcttgaagataacaatgcagatgcacaggtgttacgtcaggaattaaaggtacagaaaacgtgtctgatgaatttgatgtccagtccgggaagtggaaagacaagcacgcttctggcattgaaaccgtattttgaagggaaaatcaagtggggtgtgatggaggcagacattgattctgatgtagatgcgaatacactgatcgaggcgggaattccatcgattcagctgcatacaggaggaatgtgtcatttagatgcagatatgacacggcaaggaataaaagcatttgacagagatgagctggattttgttgtacttgagaatattggaaatcttgtttgcccggcagagtttgatacaggcgcaaactttaatctgacaattctttcagttccggaaggagacgataaaccggcaaaatatccgttgatgtatgaagtatctgatgtgttagtgataaacaaaatcgatgcattacctgtttttgatttccgaaaagactatgttgaagcatgtgcaagaagattgaatccacagattaagatcttttatatttctgcgaagacaggagatggcgtaagggaactggccgattatctgttggaacaggtacagaaagtgaatgcatgatatataaaagaagggaataaaaacatgggaaacgtcagagtgattgagataaaagaaagtgtatttgcggataatgatgctacttcaaaggcaatccgcgagaaaatgagtgcccaggggacactatttttaaatgttatgtccggaccggggagtggaaaaacaacattattaagtgcattgatcaacagaatgaaagagcagctgagaattggtgagatggatctagatatcgagacaagtctagatgcacagagagtcgcagatctgacaggcgtggaatccattcagatccataattgcggattgtgtcatattgatgcggatatggtatcgcgcgcactgcttgaatatgatacagagaaccttgatctgttaattcttgaaaatatcgggaatcttgtctgtccggcagaattcgatactggggcacataagaatgcgatgcttcttagtgtgcctgagggggacgataaaccactgaaatatccgttgatgtttcaggtaagtgatctggtgctgatcaataaaatagatactctggagtattttgattttgattttgaacttgctaaggaacgtatcttgaaattgaatccaaatgcagttgttcttccggttagcgcgaaaacgggagaaggattggaacaggtgattgactggattatgaaagaaagagaaaagctataagcaaattctcccttgatttttcagaggaaaatgctataattattcttgtgtctgctttggcagatgcaagagaaggagttgtatcgaagtggtcataacggggcgcactcgaaatgcgttagccctccggggcacgtgggttcgaatcccaccaactccgcttgtgtgtttagtggaaaatccttttaaaacaagggttttctgcttttttattgctcggaaataaaattatgttgctgtcacgttttgtcacgttttcgttttctgcatttctatatgttgtggtgacactagattctggattatctcctaaagcatttaaaatagctttctttgtttcttcctcgttatttgtatcaaacagataattttttattgttgttcgttcgtctgcatgtcctgcgattctgcttgctgttgttattggaactccattgtttactaaagttgaaacaaaggtctttctgattctgtgcgttccctttacaggaatcttaatacaacgcttacaggcatctttaaggagagtatacagcctattaggatttaatatatagccatcttttacaaacaggaaatcttgatatgattcaccagtttctttatttatccgctgtatctgttttatatactcctgcgccttttgtgttagtgggatatatctgtctcctgcatctgatttagtatattctactgcatggtatccgatacgtttcagactgtctaaattagatatatcaaaatcttctacaacctgcctgtgaatatgtatttcaccattctttatatctgaattcttaatagcaagtatttcccctctacgtgttcctagttcaaaatcaagcattatagcaagtatacatgtattagtcggattgttttgcaatctgcgattcatttcattaagtagtaattgtttttcagaactgttatatacttcctgtgtacttgctttcttcctagtcggaataatcttctttcggtttacttcaactctgtatggattctcatttgctgaaatatatcttgctgatactgcataaccaaaagtttgttttaggattccacacatattgcagaatgccttgtctttgatttctgttgtgttcactatgttatttaggaaatcatccacgtcgataggtgtaatgtccttatatggtttctgaatgaaatctggatttgttttataatactttttccaatcgaataacattcgccttattgttcctgcactaactttttctttcttatgttccatgaactcatagaatagctgttcaaaggtcatgttattatcttgcaaagacttgagttgttctttttcctttttaaaatagtaatcacataatgcagattctatttcttctctggttgttttcttcctacgaaacgcaccccctttgattgttttgtctggaatacggaaataatagtaactgtcttttccagttccataatgttttatgaaatgtccgtactttgctaaaatctccatttttttcatattgtctgtactttccagtacacctgttgtatttatcatactattagaacaactagaagcgcaagcaacaatattgagaagttcagtaaaattaagtgtcataatatataaatcctcttatctaaaatctatcattggcatgttctccttatctgtttgttatggcaagattgtttgtttcagtctatatgacaaataagtatttgtaacatagaactagcacaaattacaaacaattctatacaaataatcttgccatggttgctattctgttctgttttactgtaaaatatgttctgttttgaatgttcccaagaaattgtctatacaattcatatctttgttttgtgttctaccatgctcatttcttgcatcaaaagataaataacacattcttctggtaatttttttaaaacactcttcaatgctctatgtagtagaagatatgacagcttgtgcgtttgtttgtaggcatctactgcaatctcatatacttccttttctgtaaattcctttttgttttccatttacttgccctccctagcttaattcatccatgtacctcagaacatgattgtaattaacataatacttgttgctaatctttacatatggaattttgttttcctcaacaattattcttcttaataactgatatggtatccgcgttttgcttgccagttcgttaatacagagtagtggtggacactctggcagttcattcataacatagtcctttctttgttgcagacttttaaatctttttgattgtgcaactctctttgccgttcttgacagttcttctgatgtaacaacttttttcatatgttatccctcctcatagatttttttaaatcattagatacttgtttctgtatgtggcgtaattggaatccttccatgtacaacttgcttagttctgcctgtttctgctctaaaagaggctttatggattgctcatgcttcacaatatctggattctttgcattttctacaattacttttctctgtcgttcggtgaacaaaccgttatactgtggaagtgagcagagtttctgcaatgctatagcctgtacccttgtaggattgacacaatagttaccaatccttctgcggtcactgttctcttgaatgccattagcgtgtaattctgacatataagaatataaaatactgttactttctagttccaatttcttcaactgctctgtgctttcttcaatacgaatggctctaatctctgcaatctgtgtttgctttatttccatttgtttctcgtttgcttcaagtagttctgtgactttctggtcaagcattttacggagtttgtacacgtcaaccgtgtttacgccttcttctgatgaaaaagcatttaatagatttcttgttgcgaggtactctttagcagttttcatgtttgaaattgcattgaatacactgttataggttctaaccagtctttcttgctgtctttccatatctgccattgttttgttgcgtctatcatttgaattattaaaatacattctaaaattctcctttcatattatgcccccacaagctcgtatttgcctgtttaaaggacttttaatatctaggtgtatatttcctagggtctatatatatcctctccccatgcttcccatggttcagaatcgtcattatctatgttatttgtgagttctttcgttatctcattttctatatcatttatatctatatttcgtttgggttctataatttgcagtgttacatgagtttgtttgttctgttctgttttattgtcatgttctaacactgaataattttttcctactgctttttcaataagaaagatgttagcctttagttttgtttcagcactgaaagaactttcagctattttaattacattatcaagagcagtaggggagtatgctttcagtttactattaaagtcttgtttcctttgttttgttcccctacaaatgttcggtctacctctttgttttgtttccaatgtatcacccctttcctgttgtgttatatgggtgtatgtcctttctttagattgattgaattttaagagaacatgcgtgttttcaacgttttttctatgttacgtatgtacgagaacggacaccaacgtccgctttttaaccactgataatctgcttgctaattgaaacaaattcatcaatcacaccaatgtttacttgtatttcaccagacttttgtactctcgcccatgctttttgtgcgctattcaactttggataatacctcttgcaagctcttttaaatagttcatagtcaatctctataagattcttgtttattaacgctactgataaaggttgtccatcatgtgaaactaagtcattgtaaattattgttatcatttcttcatacactggcacattgtattcgtcattcaaatcatatctgtctgtgttattccagtaacagtcaattaacagttctttatagtcttttcgataccaacttaaaagagataggatggaatctggttttaagaactctgcaagcgtttttcctgttctggctacttttaatcctctggatgaataaatgaactcaattcgtagcaatcctttgtctgttatatttttttcttttgacttgtcatataactttaatttcactcttgaatttgacaactgtgctgtttttatcgattcaatctgttgcccagaacataagcacttcacagcttcataacgttttcctgttttctctcctgtcgcacaaataaatagtttttcgccttttgtcaaaagaattgtggcaagtaactttagcattggagctgtttttgttacgtttgaaagctccgctgtggcatttacttccgcagtacgcactattgtttcatagatatcattaccgaataggctttctaattgtgtttgcacacacgctaaaacattttcaatatgtttgaaatcttctttgcaaaatggaattgtgttatcatttctcaatacccttggtaaacacaaatgtaataaatacccatctttcacagcttgtaaatgtcctatttcatcattgtttttgttataaaaaatataatagttttgttctaaaatctttgtcgtattcacttttatgtccagtccatctaaaccgacataaactctattttttttctttctgctcataaattgttttgttcctcctatttctgcaataaaaaaagacctatagcaaaaggaagaatgtggttggaacttcctgtgcctaggtcttttctacatagtaaatgagagcgaacaatactcacaaacattagcatggctttcttaggtttctatttcatatgctccttttacgcataaccatgacagattataacaatagagaaacgcaccacacggactccaaaaacaattatttcaatattcattttcttctagtttgtttgaattattgcacgaacttgtgcttgatttgttttataacatatataagaaatatgtattttaataatattatatttatataataatatatatgtcttttattaacttatatatatattatacatctaacaaaaattgatgtcaaattcccttggaatattctgaaaatttatcaagttttattgtcatgatatacaattttattatatcactggatacctctataagcctgtattttcctatttaaaagacttttgatattgcattgataaaatatgcctactatgtagtaatatagattatacgagcttctgtgggattatattggttgtgaaaataatcatttaaaaatatcaaaaaaagagtgatatacttaaatcattattttcattgacaggtgtattggaaattctcctttccatgtttggttctatatgttgtatggtgtcacgaagttgtcacgcttgctctgtctgactccaaaaagccttgatttcaaaggaattgtggaaaattcacggttccttcgaatcccaccaactccgtttgtatgtttagcatgtaggtatcattataacgataagtaaaagtaagaaaaaagcactaacagaagagatatcactcttctgttagtgctttttcgatttaagagtgagaaacgatatgttttttaattgcgttgaaactttcctcactgatcacatgctccatacgacaagcatcatcagcggcaatctgtgggtcaacaccgagtctctcaagccaggaagagagaagagtgtgacgctcatatatcatgtcagcaatcgcctgtccggattctgttaatgtaatatagccctcacgagatacaataatatgttcgctttctctgagctttttcattgctacactgacacttgatttcttaaagttaagctctgttgcaatgtcgacggcacgtacgacaggaagcttcttgcttaacatgaggattgtctccagataattttcagatgattcatttacatgcataggtaatggcctcctctatataaattataatttatctgtatcactatttacagtgaattttcatgtctttgcttagtatatcataatttattccctacagcaaatgattttccagacaaattttgattccccaattccgatttacacggaacagaaaaattaaaaaaatataaattagtcattgacaactaatagagattagcatatactaacttacgaacggaagagaaaatgaaaaaaattatcaatctcaaccgtttttaataatctatatcaaatgagaatggattctaatatcatttaagaaagaagcgtgagattatgccacttacaatggccaacattggcgaagccaatacaattaaaagagtaagcggaaatgatgagacaaagcgttttcttgcgaatcttggatttgtaccgggagcagaagtaatcgtactttctgccattggcggtaatgtaattgtaaacatcaaagattcaagagtcgcagtaaatgccgatatggcgcgccatattatgatctgattgagacgctgaaaaagtgatgagtaaagtaaggaaggagtatgtgttatgactttaggtgatgcaaaagtaggaactactgttgtagttacaaaaatcgaaggagacagtgcttacaaacgccgtattatggatatgggaataacaaaaggaagtgaactttttatcagaaaagttgcaccacttggtgatccggttgaaattacagttcgtggatacgagcttactgtcagaaaggcagatgcacagtgtgtagaggttaaataagcctacagatacaaaaaacctgatgagagattctagaatttaaggaggtaaagagagtaatggcaatcacaattgcacttgcaggaaacccgaactgcggtaagacaacactgtttaatgctcttacaggagcaaaccagtatgttggaaactggccgggagtaacggtagagaaaaaagaaggtaagatcaagaataagaaatacaaaaaggaagatgttacagtaactgaccttccgggaatctattccctttctccatatacacttgaagaggttgtcagccgtgattatgttctgaatgagaacccggatgtaatcgtcgatcttgttgatgcaactaacatcgaacgtaacctgtatcttacaacacagctggttgagacaggagtaccggttgtaatcgcattgaacatgtgcgatcttctcgctaagagaggtattaagattgatgtaaaacgtctttccatgctgatcggatgcccaattgttgagatttcagcattgaagcagaaaggtctggatgaactgatcaatgaagcaatcaaagttgcaaagcagaaggaagtaaaacttcctagtgagatctttgcaaaagatatagaagctgctgtagaaagcgtaaaggaaatccttcctgatacaattacagaagataagaaaagatggtacgctgtaaagttccttgaaaatgacagcaaagttgtagagcaggtaaaactttcaggtgcagcaaaagcagttgttgaagatgaaagaacaaaactggaaaagaaacatgatgacgatatggaaagtattgtaactgacggacgctatcagtttatccagaaaattgtaggaactactgttaaaaaagcaaaagaaaaactgacaacatcggataaaattgaccgtatcgttacaaaccgtatcctcggtattccgattttcattgcagttatgtggcttgtatattacatatctgtcacaacagtaggtacatttgtaacagactggacaaatgatacattcgttggagccattcaggaggcagttggaggattccttacaaatgtcggagcaagtgatctgatcaacggacttgtagtggatggtatcatcggcggacttggagcagtacttggattcgttccacagatggcaatcctgttccttttcctgtctattcttgaagactgtggatacatggtacgtatcgcattcgtcatggaccgtgtgttcagacatttcggactttcaggtaagagctttattccgcttctgatttcttcaggatgtggaatccctggaatcatggcttccaagacaattgagcaggacaacgacagacgtcttacaatcatgacagcaacatttatcccatgtggagcaaaacttccggttatcgctatgatgggtggagtaattgccggtgaagtagcaggatatcaggagagctccttcattgcaccattgatgtactttgtaggaatcgttgcagtacttgtttctgcaatcatcctgaagaagacaaaacctttctcaggaaaaccggctccgttcgtaatggagcttccacagtaccatattccacaggctaagacagttctccttcatgtttgggagagactgaaaggattcatcatcaaagccggaacaatcctgttccttgcatgtgtagtaatgtggttccttggtggattcggattcacagcagacggattcggacttgtagaagacagcgcagacagcttgatggcagcaatcggtggagtgatcgctcctctgttcgcaccacttggatttggcgagtggcagccagtagcggcatctatctcaggatttactgcaaaagaagcaatcgtttctacaatgggagttcttgcaaatgtatccggagatacagaagacgcagtgacagtagcacagggagttgcttcctggttcccgtcaacaattgcagcatttacattccttctgttcaacctgcttgactcaccttgtcttgcagcaatcgcgacaatggcacagcagatgcagtccagaaaatggttctggtttgcaatcctgttccagaatgtatttgcttatgttgtttgcctgatcgtataccaggtgggatctttcgtaacaggcggagcatttggcgtaggtacagcagtaggatttatcttattgatcttccttctgttcatgctcttcagaccagatccgtacaaagatcagaaagtatactcaaaacgttctgtgcaggcagcgtaatatgaaaaaagcaagaatgcggaagtgttcttgaataaaatggagctgggtgcaggaaatgtatccggctctctgttataattagagaaaaagcgaggtgttgaagacaatgatagcaaatattgtaataataattttgataatcggatattgtatttttctcatttataaaggatataagaaccataaagaagggaaacatgtcggatgcgccgggtgcagcggcaactgtggaagctgcagcggatgcagtgcggcagctggaaaatctcaatatacaaagaaaaagtaaaaggtgattagaatgggaaattcaacaggttctatgttttacgcattcggtgcattccttttgatttaccttgtaggtgtattcatttatcagatttatctgtgggttaagaaatggagagaaaacagagaagagaaagaagactaaaagagggatcacaaaatggcagatattatcattatattaattgtaatcatcttgcttgggttggctctgaaaggatcaatcaaacattttaaaggagaaggtccttgttgcggaggcggttcaggaagcagcaagaaggcaaaaacaaagtttttagacggtccggtgattggcagaaaaacgttgaagatttcaggaatgcactgcgagcattgtgcgaataccgtaacaaatgcattgaatggattggatggtgttactgcaaaggtgagtttgaaggaaaatcgtgcagaagtttcctatgacagagaaattgatctggcagatttaaaaaatgcagtaaaaaatgcaggttatgaggtcacctctatctcatgagagtgaaactctgtgagatggcgaagtaactgatacagcgaagaccagaaagcaggaggtgtaccgtgagtaagaaagagcagattatcgaaaaattaaaagaaaacggatgccggatcacaaaacagcgtaagatgttgattgatattattttggaaaatgaatgctcaagctgtaaagaaatcttttataaggcatcccaggcagatgaaaagatcggtgtggcaactgtttacagaatgatcaatgcattagaagaaatcggagcaatcaacagaaaaaatatgtataaagttgattgtgcgcaggattgtccggaagatgggggatgtatcatcatgctggatgatgatacgatctttaaacttacggaaacagggtggaacaaggtgatccgcgaaggactgaaacattgcggttatgtaaaagatcaaaaagtaacatcaattaaattaccggataataaacgataaaatttatcgataaatgcagttagaattgactatctgtatagtgagttgatatgatgtataaaaattttaggaggttttatacaatgtgggatatatttaaattgaaaaaagcaggaatctttgcaggaggtgttcttttcggaacagcgggagtgaaaattcttgctagtgatgatgcaaagaaagtttatacaaactgtacagcagcagttttaagagcaaaagactgtgtgatgaagacagcaacaactgttcaggagaatgcagaagatattcttgcagaggctcagcagatcaatgagtcacgtgcagcaaaagaggctgaggctgtctacgaagcagaagaagcagaagagacagaaactcaggaagagaatacaggtgcgcaggatttcaaagaggaagaagtttaaatctctatgaaatttattgtaaagcatgagatcaatggccgccttcgtatccatgttgtccagaaaaggatgacatatacggaggcggatactctatcctggtttctctccaatcagaagaatgtaacagatgtaaaagtatatgaacgcaccgcagatgctgtgatctgttatgttggagataaggaagaggtcttgaatttattgaagcagttttcttatgaaaatgcaattcttccggaacatgttgctgcaggttctggaagagagctgaatgctgtttatcaggaaaagctggtcatgaagacagttcttcattatggaagtaagttattccttccgatgccggtccgtgcagtgattacatctgtaaaatcagtgaaatatatctggcacggaatccgttgcctgatgcatggtaagatagaggttcctgttctggatgctacagcaatcagcgtttccgtattccgtagagattatgctacagctggatctgtcatgttcctgcttggaattggtgagatcatagaagaatggacgcataaaaagtctgtcggagatcttgcgcgcagtatgtcacttaatgtcaataaagtgtggctgaagagaaatgaacaggagattcttgtaaaatcatcagatattgagccgggcgaccatgttgtgatccgtatgggaaatgtgatcccgtttgatggggaagtagttactggtgaaggaatggtcaatcaggcatctcttacaggtgagtcacttcctgtaagaagaagtgtaggacagtctgttttcgctggaacagttctcgaagaaggtgagattgaagttcttgtcaaagcggtatcaggctctacgagatttgagaagattgtgacaatgatcgaggattctgaaaaactgaagtcttctgtagaaggtaaggcagaacatcttgcagatagacttgttccatatacattactggggacaggtgcagtctggcttctgacaagaaatattacgaagacactgtctgttctgatggtagatttctcctgtgcattgaagcttgcgatgccgatcactgtactttcggcaatccgtgaggcaggcgagaacaatatcacagtaaagggtggtaagttcttagaggccgtggccgatgcagatacaatcgttttcgataagacaggaacattgacaaaggcaacgccgacagtgaaagagattgttgctttcagtgaatactcagaaaatgatctgcttcgtattgcagcatgtctggaagaacattttcctcattctatggcaaaggccgttgtagatgcagcgaaagaaagacatttgtctcatgaagaaatgcactcaaaggtagaatatgttgtggcacatggaatctcttcctctattgatgataaaaaggttctgatcggaagcagtcatttcattttcgaagatgaaggatgtacgatttcatccgaatatcaggatagatacgattcattaaaaccagaatactctcatctgtatctggcaattgagaaacaacttgttgcagttatctgcattgaagacccacttcgtgaagaggcaacagaaatggttcgtgatctgaagaaagccggtatccgtaaagttgttatgatgacaggtgacagtgaacgtacagcggcggcaattgcaaaacgcgttggcgttgacgaatattatgctgaggttcttccggaagataaagcgaatttcgttgagaaagaaaaagcagaaggaagaaaagtaattatgatcggtgatggaatcaatgattcacctgctctttcagcagcggatgcggggattgcaatcagtgacggcgcagagattgcaagagagattgcagatatcacgattgcggcagatgacctgcgtgaagttgtgacgctgaaacttctggcaaatgccatgatgaagcggatacataagaattacagaaatatcgtcggaatcaattcaggactgattctgcttggcgtgacaggaattgtccagccgacagtatctgcacttttgcacaatgcgtctacattgatgataagccttagaagtatgaagaatctgctggatgaaaataaaagaacagaacttgagtagttactgtgaacagcaatcttgagtgaaacaacataaaataaaaaaggcaagaaaaagaactgccgggattaacttttgtagaggtttgtcccggtagttcttttttatatgttaggaaagttctttcctaacatataaaaaacgctccgctcaggatgcgcactgcggcgtacaaggtaggtgtcgcaagcgaccgccgcaggcgcaagaatgtgccaaggcacattctttattctaatgagaaacattatcagtaaatgatattgatattacgttttcattatagtatagtaaatacataggttagacacaactaacgaacaaggaagatatgtggaaatgaattcataaaacatacaggaaagtaataagtaaagcaatagataatcagatcttaatttcaggaggttcagtatgagtgtagtaatcattggaggacatgacagaatggtatgtcagtataagaaagtctgtaaacagtttaattgtaaggcgaagatcttcacccagatgtcagcaagcttaagcaaacagattggaagtcctgatctgatcgttcttttcacaaacacagtatcccataaaatggttcgctgtgcggtagaagaggccggcagatgcaatgcggatgtgattcgctgtcatacgagttccaagaatgcgttagaagagattctggagaatgtttgtgcataataaatattgctgaattattgaaactatgaaaatagaaaagtcccttcagaagaaataaacttctgaaagggactttttctgtatcatgctgccaattacgcagattatcaatctgaacaggatcacagcaccaatttctataactggatatttttaaagagatctccaaggtttgttccgatatcttccgctttcgggatcacaaccttttcagctttctcttcagccttctctttgtcttcttcgagagctttcatgctaaggctgatcttgccatctttgataccgatgactttcacttcaacttcatcgccaactgtgagaacatcagaaggcatttttacacgcttctgggagatctgtgaaacgtgaaccagaccggaaagtccgttctccaactttacaaatgctccatagttctgaagtgtttctacagttcctttcagaacagttccaaccttcatacttgcaatttgtgcatcacgtgctgctttttccttttccttcagaagctcacgtgcagaaaggacaagacgattattcgcctggtcaacatcgatcacctgtacttcgatatctttgagaagataatcttccagattctcaatataggaaagggacagcttagaagccggaacgaatccgcgaagtccttctaccattacaattacgccaccgttgacaacaccttcaattttaacaggaagaacagttttcttatccatataatcctggactctgttccatggattcgcatcatcgaaatgatcttcatagtctgccattgtttctgttacttcatttgtctgtaattctttcatttcttcgctcattaaaagcacctcattttctttttctcgttaatcaaaagtataacatatgtatgagaaaaaatacaacaaaagagccaaaatccgtgaagaaaatgaaaaatgcggttggattaatagaaaaaaaatgttactctacttattgaatagtaaattgtcaggtttaatacttaatgaagaagctgttcatgtaagatgacagaatacagagataaattgatgtgagtgtaaaagtaaataagagataaatttgagaaggagagatagaaaaatggctgagaataaaaaggtgtatgttgtaggtcataagaatccggatacagattctatttgtacagcaattgcttatgcaaatcttaagacaaagattaccggagaaacgtatgagcctcgtcgtgcagggcagcttaacgaggagacacaatatgtactggaacactttggcgtaaaagttccgttattactttctgatcttagagaacagattaaaaatgtggaattgaaagaaagtcaggaaattcagggaagcctctcaatccgtacagcatgggaaaagatgtcagagatgaatactcatacgattccaatcacacgtaatggtgtgctggaaggtgtgatcacaaaaggtgatattgcgaaatcctatatggaagtctatgataacacaatgcttgcgaaggcaagaacacagtaccgtaatattgcagcggcagtagaaggtgaaattgtaacaggaaatgaacatggttatttttataaaggaaaagtaactgttgcagcatcaagcaaagagttgatgacaagctttatcgagaaagatgatcttgttatcattggggatcgaattgatgcacagcagtgtgcagttgatctggatgcaagctgtatggtagtctgccagaatgatccgatctcagaagatattctgcgtcaggcagaggcaaaagaaattgtcgttatctggacacagcatgatacatttacggcagcgcagcatatcagccagagtattccggtaagatctttcatgacaaaggatcaactcgtaacattccgcaagaatgattatgtagatgatgtgaaagaagtgatggcacgcaagcgtttccgcgacttccctgttgtagataaagatggaaagttcttaggtcttgtttccagacgaagacttctcaatgtcagcaagaaacaggtgatccttgtcgatcataatgagaagaaccaggcagtagacggagtggaagaggcagatgtccaggagattattgatcaccacagattgagcagtatcgagacgatcggacctgtatttttcagaaatcagccggttggatgtacagcaacaattgtatctcagatgtacgaggaaaatggtgtcgaaatagatccggtgaatgcaggacttctttgttccgcgatcatttccgatacattgatgttccgttccccaacttgtacatcacttgatgaaagcacagcgaaaaggcttgcagagattgcagggatcaatatagagaaacttgcgcaggcgatgttcaaggcaggaagcaacctcaaaggaaagacagccgaggagattctcttccttgattttaaacagtttacagtgaatgatacggtatttggtgttggtcaggtgaattcaatgagcgaagaagagcttgaagagattaaggcaacagtacttccggagatggaaaagacaagacaaaatcacggtctggatatgattttctttatgctgacaaatattattacagagtcttctgaactgatctgcagtggtaatgaagcaagagaaaagattatcggagcttatgatttggaagataatgcacagaaactgatgctcaaaggtgtcgtatcacgtaagaaacagctcgttccggcacttgtatcagcactgcagcagtaagaagcccaagatattttcaaatagaaagtcagaaccgtctccgtaacaggggacggttttcaggaggaaagagaaatggcgaaacaggtatggaaagccggtaatatggtctacccgcttccggcagttatggtaagtacggcagataaagaaggaaatacgaacatttttaccgttgcatggacaggaactgtatgtacaaatccggcgatggtatacatttccgtaagaccggaaagatattcgtatcatatgattgaagagagcggagagtttgtgatcaatctgacaaccgaacagctcgcccatgcgactgattactgtggtgtgcgctccggccgggatgtggataaatggaaagagtgtcatttgactgcgaaaaaggcagagaagcttacttacgcaccggtcattgaagaagcaccggtcaatattgaatgtgtagtgacaaaaattgagaaacttggaagtcaccatatgtttcttgcagaagtgaaagcggttcaggtggacgagtcctatatggatgagaagggcaaattcgaactcaataagacaggtcttctggcatattcccatggagaatatcttggacttggaaaaaagatcggaacgtttggatacagcgtgagaaaaaagaagaccgttgacaaacgaactgctaagaagatcacaacaaaaaatgaatcaaggagcaagaaatctccagagaaaagaactgtgaataaaaatgcaacattcagaaagaaaggaaaagctaagaaatgatttcatttgaaaatgactattcagaaggcgcacatgaggaaatcctgcgcagactggcagaagtaaataaagaaggaattacaggatacggaaatgattcatattgtgaatccgcaaaggaaaagatccgtcaggcatgtaaatgcccagaggcagacatttacttccttgtgggaggaacacagacaaatcagacagtaattgattccgtgctccagagctatgaaggcgttatcgcggctgagacaggtcatgttgcatcacacgaggcgggtgcgattgaagcatccggtcataaagtactgacccttccgcagctggaaggaaagattcagcccaaagatgtggcagattatttgaatcagttttatagtgatgggaatcatgaacacatggttttcccggggatggtctacatctctcacccaacagagtatggcacactgtatacacgtggcgaactcgcagagctttctgatatctgtcagcagtatcatattccactgtatcttgatggagcacgtcttggatacggtcttgcagtagaagatacagatgtgacaatggaagatattgcagaatactgtgatattttctatattggtggaacaaaggtaggtgccttttgcggagaggcagttgtatttacaaaagaaaatgcaccgagacattttgtgacgctgatcaaacagcacggagcactgcttgccaaaggctggttccttggtgttcagtttgatacgttatttacagatgatctgtatatgaaaatcagtaagaatgcaatcgaaacagctgcgagactgaaggaaatcctgaaagaaaaaggatatgatttctatattgattccccgacgaaccagatctttgttgagatggaagacgagaagctgaaagaacttgagaagaatgtcagggtcagcttctgggagaagacggatgagaaacatacggtagtcagatttgctacgagctgggcgacagatatggagaaggttgagaagctgagggagtatttataaaaaagtaagaatataaataatagcaaatacagataatatatagaagcccataaaatgagaatcattatcatgtagaaatattgcgttttgcaaagaaacttgatagaatacatatggttagagaaaactaactgtgtgaataaatcatgtatactcctttgtctgtaatacctgaacacaggcgagggagtcctcagaaaggatggacaactatgaattatctggaaattgaaaaagtaattggaagagaaattatcgactcacgcggaaatccaacggttgaggcagaagtgcatcttgtagatggaactgtagcaagaggtgcagctccaagtggtgcttctaccggagaatttgaggcacttgaacttcgtgatggagacaagtcaaaattcggtggaaaaggtgtttcccgtgcagtagaaaatattaatacaacaatcaacagtgcattggttggaatggatgcaggagacacttatgcaattgatcaggcaatgatccaggcagatggaacaaaagataaatcgaatcttggcgcaaatgcaattcttgcggtttcaatcgcatgtgcaagagcggcagcagatgcacttgagatttcgttgtaccgttttcttggaggagtgaatggaaacagacttcctgttccaatgatgaacattgtaaatggcgggtgtcatgcactttcttctggactggatgtgcaggagttcatgatcatgccggtgggagcgccgtcttttaaagaatgcatccgctggtgtacagaggtattccatgcacttgcaggaatcttgaaagacagaggacttgcaacatctgtaggcgatgagggtggatttgccccggcactgaaatcagacgaagaagcaatcgagacaattcttgaggctgtgaagaaggccggatatgagcctggaaaagacttcaagattgcgatggatgcggcatcttcagaatggaagacagggacgattggagagtataaacttccaaaggcaggaacagtctatacttcagaacagctcattgaccactggaagaaactggtagagaaatatccgatcatctcaatcgaagatgcacttgatgaggaagactgggaaggctggaaaaagctgacagcagagctgggagataaagttcagctggttggagatgatctttttgtcacaaacacagagagactggcgaaaggaattaagcttggatgcggaaattctattctgatcaaactgaatcagattggatctgtatctgagactcttgaagcaatcaagatggcacacaaagcaggttacacagcaatttcttcccaccgttccggtgagacagaggacacaacgattgcagatcttgcagtagcgctgaatacctgccagatcaagaccggagcgccgagccgttcggagcgtgtagcgaaatataatcagttactccgcatcgaggaagaacttggaacaagcgcagtatatccggggaatgacgcatttaatgtgagataacatcagtaaaataacctgacagtcaggaaaatccatgcattttatgatctcagtgggatgaaatgcatggatttttgtgcatgtatttctttgatttccatctagatttttttagctatatgtcatacaatagaaatgtaattgccgtcaggcaacataatatttaataatatttggaggatttcattatgaaaaaaccggttctggtcattatggcagcaggaatgggaagcagatatggcgggctgaagcagattgacccggtagatcaggaaggacatattattatggatttctcgatctttgatgcaaaacgcgcaggatttgagaaagtcgtatttattattaagaaagaaaatgaagcagattttaaagaagctgttggaaagagaattgagaagatcatggatgtagcgtatgtattccaggatctgaacaatctcccggaaggttacgaagttccggaaggacgtgtaaagccttggggaacagcacatgctgttttaagtgcgatcgatgaggtggatggaccatttgcagtaatcaacgcggacgattattacggacgtcatgcatttgagacgatctatgaattccttacaacacatgaagatgatgataagtaccgttatacaatggtaggttatcgtctgaagaatacagttacagataacggacatgttgctcgtggcgtatgtgaactcaatgaggcgaaagagctggttggaatcacagagcgtacaaagatcgagaagcgtgacggtggaatcgctttctcagaagatgacggagagacatggacaactatcgacggagatactcttgtatccatgaatatgtggggattcacaagaagtattttagatgagatcaaagcaggattcccggcattccttgagaaaggtattaaggagaatccaatgaaatgtgagtacttcctgccatccgtagtcagtgaccttctggcagagggcagagcaaccgtaagagtgcttgaatccgaagataaatggtatggagttacatacaaagaggacaagccggttgtagttgcagcggtacaggctttgaaagacgaaggtctttatccacagaaattgtgggattagattatgtgttgtcagttacagaatttgtgaacaataatgatcatgcaacatttttaccataagaggaactattcgtataaagatttttgtggtggatgtgttataatcagagacaacaaagcaaagataagcaagctgctgaacacagttactgtgagtggcagcagcctgagcagtcaaagctcaaaggaggattttaaaaatggcaattttagtaacaggaggcgccggatttatcggaagccacacatgtgtagaacttttgaatgcaggatatgatgttgtaatcgcagataacctttacaacgcatcagagaaagctgtagacagagtaaaacagatcacaggaaaagatctgaagttctataaagcagatatccgcgacaaagaagcaatgaacgagatctttgagaaagaagagatcgagtcggttattcatttcgcaggacttaaggcagtaggtgaatcagttgttaaaccactcgaatactacgagaataacattgcaggaactttagttctctgtgatgtaatgagaaatcacggcgtgaagaatatcatcttcagttcttctgcaacagtatatggtgacccggcatttatcccgatcacagaagagtgcccgaagggaacatgtacaaatccatacggatggacaaaatggatgctggagcagatcctgacagatcttcatacagcagatccggagtggaatgtcgtacttcttcgttacttcaatccaatcggagctcatgagagcggactgatcggagaagatccgaagggaatcccgaacaacttgatcccatacattacacaggtcgcaatcggtaaacttgagtgcctcggtgtgtttggagatgattatgatacacctgacggaacaggtgtccgcgattacatccacgtagttgatctcgcagtgggacatgtccgcgcagtagaaaaactgaaagagaaagcaggagtttccgtatataatcttggaacaggaaacggatattccgtacttgacatggtgaaagcattttccaaagcttgtggaaaagagattccttatcagattaaaccacgtcgtgcaggagatattgctacatgttactgtgatgcttccaaggcaaaggaagaactgcactgggtagctgagagagatctgaacaagatgtgtgaagattcctggagatggcagagcatgaatccaaatggatacgaggattaagattgaataatcatttataatgtgaaatggaaagttgttgatgagcaggggcgcgcgatgatagtgtagtttcctgtgccatcaacaacttttttgtatcatttgtaaattatgttgaccaaccgcgaacaataacacagctcttgcaaccaacagtccatctgtattatactaatagaacacgattaaattcagaaaaaatggagatagatagaaaatgaagcgcaaagtagatcttaatgaaatttcagacggacgtctgtattcctctggagatatggttaaggtggactgtcatgactgtgaaggctgctctgcatgctgccagggaatgggaaattctattatattggatccaatggatctgtggagattgcaactcggaaaaaaagagaattttgatacactgcttgcaaactatctggaattgaatgtagttgacgggatggtacttcctaatttaaagatggcaggagaggaagaagcctgtctgttcttgaaagatggaagatgttctattcatggatacagaccgggaatctgccgtttgttccctcttggacgtatttatgaggagaatggattcaagtattttatccaggtgcatgagtgtaagaagcaggaacgtggtaaagtgaagattaagaagtggcttggaattgcagatcagaagagatacgaagatttcgtgtggagatggcatacatttcttaagaactgtgaagaaggaatgaaagaacttgatgagcagaacgcgaaagtactgacggttgtggttctccgtaacttttatcaaatgccttatcaggcagaggaagaagcacagttttatccggaatttgaagaaagactggaaagactgaatgcaatgtttggattttagaagtgaaagttaacaacaggtgaaaggcagcagtagatggaaagcaacagtagaaaaacacagatattaaaagaaatttttggatacgattctttccgtaaaggacaggaggagattgtagatcagattttgaatggaagagatgtgttggcaatcatgccgaccggagcaggaaagtcactttgttatcaggttccggcacttctgatgtctgggatcacgatcgtagtatcaccgctgatttcattgatgatcgatcaggtgaaggcactgaatgaagcaggagttcatgcagcgtatattaacagtgcactgacagaacggcagattacaaaagcattagaactggcagcggcaggcagatataagatgatctatgtcgctccggaacgcttgttgacaccacggtttctggactttgcatgtcatacagaactttctatggtgacaatcgatgaagctcactgtatttcccagtggggacaggatttccgtccaagttatgtgaagatcacagaattcatccgtcagcttccaagacgcccggtcgtcagtgcatttacagcaacagcaacacagaaagtaagagaagatattcttgaagtacttgatcttgaatctccttatataaatgtatccggttttgacagagagaacctttacttcgaagtaagaccagcgcgtgggaagaaggatgcaattaaggaatatcttacacagcacagagaagacagtggaattatttactgtgcaacaagaaaaaatgtagatgaactctatttggaattgcagaatgccggattttctgtcggaagatatcatgcaggaatggggacagaggcaagaaatgaaagtcaggaagatttcatttatgacaggatagagattatgatcgcaacgaatgcatttggaatgggaatagataagtccaatgtccgttttgtacttcattataatatgccgcagagcatggaaaattattaccaggaggcaggcagagccggacgagacggagaaccggcagaatgtatccttttctattcaccgcaggatatcatgatcaatcagctcctgctggatagtaaagagcagattggagaatacacagaagaagaactccgggtgatccgggaacaggatgttctccggctgcgtaagatgagtaattattgtacgacaagcatgtgtcttagaaaatacatattgaattattttggacaagagacagaagaacattgtgggaattgttccaattgtctggaagaattcgtagagcttgatgtcggagagattgcggcagatgtgatcgagtgtgtgcgcgaatccagacagagatacggtatgacaatgatcctttccacactggctggagcgaatacagcgaagatcagaagtgcagggatgaatgaactttccatttatggaagacagagtaaatgttctcagcagaggttgaaagacgtagtttatacactgctcgaacacggatatcttcaacagagcgcagatcgttatgcgatcctgaaactgacagaccggtcagaagaattactgaaatcgagagaattgaaacttcgctgcaagaagtcagaacttacagaaaagaagaagtccggaagcggaaagaaagcatctcatagaaaaggcgagatttccggaaatcttacggataaaagccgggaattattcgaagaattgcgttctatgcgttattctctggcaaagaaaaaaggaattccgccatacatggttgcttcagatcgtacattacatgagatgtgtgtacttgttccatttaaaaaagaggaactgcttgaagtacacggtatgggacttaagaaatatgaacagtacggagcagtttttcttgataagattcaagaagtgacagcaggtgataaaaaaggttacggtatatcagaagatgctgatgggacagacgcagttcagaaccagaatcctctggacatcggaccatttggaagcgtagagaattaacagcaaaaaagaagtaaaagaaagaagtgacataaaagtgtctgtaaaaatatttccaacattaaaaaattataaaaaagaatatttgccaaaagatattttaagcggaattatcatggcagcggtctcaattccaatctctatggggtatgcacagatcgcaggtgttccggcggtgtatggactttatggatctgttctgccgatcctgctatttgccatgctctcaacttcaaaacagtttatcttcggagtagatgcggcaccggcggcaattgtcggagctgcactggcaacacttggagtgacggcagaatcagcccaggcattgcagtatgtaccattgatcgcattgtttacgggactctggttattgttgttttatcttttacatgcagataagattgttgattttatctcaacaccggttatgggtggatttatcagtggtattgcagtgacaattattatgatgcagattccgaaactgatgggaagcccggcggggactggagaattcatagaacttgcagaacacatttttcaggcaatcacaaagataaactggttgtcctttggaatgggaattggagcacttgtaatcttgattgtatccaaaaaactgattccaaagttcccgatggcaatcgttattatgattgccggagttctctcgacaattgtctttcatgtaaaccagtatggtgtagttctcctgcaggcagttcaaccagggcttccgcggcttattttcccggattttacaggaatcaatcttacacaggccgtgggaagagcacttatggttgctgttgtgatcatggcagagacacttttgtcagagaacaattttgcatccaaaaacggatatgaactggatgatcgtcaggaaatccttgcctgtgccgcaggaaatcttgctgccggtgcagttggatgctgtccggtaaatggaagtatttccaggacttccatgaatgaacagtatggaggaaagacacaggctgtatccattacagcgggactgaccatggcagttgtacttataggtgcaaccggatttatcgaatatcttccggttccggtattgacggcaatcgtaatttctgcactgatgaatgttgtagagacacatcttgcagtacgcttgtttaaagtaagcagaaatgaattctatatttttattgcagcagggatcggtgtgctgttccttggtacgatttacggagttgtgatcggaattttgttatcttttgtagcagtgattttaagggctacaaaccctccgagatctttccgtggaatgattccgggaaaagaagtttattatgatctggagaggaaccgttttgcatatccaatcaagcatgtgattatttacagatttagcgagaaccttttctttgcaaataacaaagtgctggtttcagatattgaaaacagcatcaaagaggatacaaaggtcgtaattctggacgcatcagcaatcaacagcctggatattacagcggcagatgcactcgaaatgcttgcagcaagtctgaaaaaacgtggaattaagttctatatcacagaacattccagagaagttaacgatcagatgagaaagcttggaatcggacatttgataaaagaaggtgctgtgcgaagaacaattcttgcggcacttcatgatgcggggattgagcagccttgcccattggatattccagaagaagatctcgaaaaacttaagcgaagagaatatttttcccttcctgcagaagaagaaaatacactggaagagtttgcatgggcatttggtgatgatgcagtcaaagaaattgagaaacgagtgctttctattgtgaagcagatccatgagattacagatctcgagaaactttccgaagaaggaatcaaagaaaaactggaattttggaattcacttggagcacttgatgaagatgagttgctccgcagaatggaacttcacttagatgatcttccaagtgatgtaaaagaaaacaaaaaactcgtcattgaattaatcgagcgtagaagaagaaaacttagagatcgtcttctgaaagagcatccagagattgttgagcatattgaagagcgaagagagcggctggaacgaagacttgagaaacagaatccagatgcagtaaagcgtctgaaacactggaaagatgaagaattctaaagaacaatctttaagattcttaataaatcattaggattgttaaagtccccttgtttctgcaaaaaaggaatgctatgattaatatggaagaaaaagtcaggggacaattttgattgtcccctgattttaagaatagaaaagaaaaaagggataagcatgtggtctagagaaacaaaagaagaaaaagaacgcaagaaagaacaagcgttttatgaacattatagcgcgatgggaaaaagcacagattccattagaaaagagtgggagagacgcaagaggaatgaacaacgcattcgacgcatcaagagacgaaggagaattgcaatcatattgattctgttcgttgtattagttccggcagtttcaacatttacttattttaaaatgaatccgattgtattacggagtaaagtgatcgcgcaggaaaagaaagaaagtatggatctgatgtccaacatccgtttcgttgttggtggaaaagcgaaagatgtgaagacagaagggaaagtagatacgaataaagaaggaaaatatacggtttactatgtctacggtaaacaaaaagtaaaagcggaagtcgaagttaaggatacaaaagcacctgagcttaaaatgaaagacagttatacaacagaacttccgaaagatatcaagccggaagattttgtagaatcagtaaaagatgcatcagatgtcacacttgaatttgtcggacaggattcctgggagaagaaaggaaaatacggagtaactgttgctgcaacagatagtgacggtcataaaacagaaggtaaatcaacactgaatctggaagaggatacaacaggaccgactattgaaggagcagatgataaagaacttgcacagggcgatacgatggactttaatgaaggggttacgataaaggatgatatggatccagagccaacattggaagtacagggtgctgacaaagtggattttgcgacaccgggaacctatattgtcacctatcttgcaaaagaccgttccggaaatgagacaaagattgagcgaaagatcaaagtgaaagagaatccggattggaatgagaaagttgtttatctgacttttgatgatggtccttcagagaataccggagagattcttgatatcctgaaagagaaaaatgcgaaggcaaccttcttcgtcacaggaaataatcaggaacatgatgatatgataaaaagagccttttccgaaggacattcgatcggacttcatacctatacacacgattatgcaacagtttacgcatccgaagatgcatacttcgcagatctgcagaaagtatcggatctggtagagagtatcacaggaacgaaatccatgatcattcgttttccgggaggatccagcaacaccgtcagtgcaaaatatgtcaaaggattgatgacaacacttacgaaagcagtgagagaccaaggatatcagtattttgactggaactgtgattctactgacgcaagcggaaataatgttccggtagaaaagctggtttccaacgcaacatcctgcacggcaaatcatgttgatattctgatgcatgatacagatgcaaaagatacaaccgtacaggcattgccacagattgttgattactatagaagtcagggatacacattcaaaggactgaccgttgatagtgtggcagcgcaccatggagtgaataattgataaatattagaaagagccaggacaggcacaacacacggtgtctgttctggctcttaattatatcttaatcctcatcatctgtctgtacagagtaagtctgtctctttcttgccatctcatcgctctcaagatattcatcataagttgtgatcttatcgatcagcttaccgcccggaacaatctccatgatacggttcgctgttgtctgtacgatctggtggtctctggaagtaaagagaagtactccagggaacttgatcagaccattgttgagtgctgtgatagactccatatccaggtggtttgttggctcatcaagaagcagtacatttgctcctgagatcatcatcttggagagcaggcagcgaaccttctcaccaccggaaagtacagcaactttcttcactccgtcttcaccggagaagagcattcttccaaggaatccacgaacataagttacatccttttcctcagagtactgtgtcagccactctgtgatattgtagtcattgtcgaattctccgccgaaatccttcgggaagtaagcctgagaagttgtaactccccatttatatgttccctcatccggttccatctcgccgatcaggatcttgaagaggattgtcttagcaaactcatttccaccaacaaaagcaactttatcctcgcggccaagtgtgaatgtaaggttatcaagaatcttctcgccgtcaattgtcttggaaagtccttctacagtgagaacttcattaccaatctcacggttcggacggaagtcaatgtaaggatatttacggctggaaggtctgatctcatcaagctggattttctccagggcacgctttctggaagtagcctgtttggacttggaagcgttcgcactgaatcgggaaataaattcctgcagctctttgatcttttcttcttttttcttgttggcctctttcatctgacggatcagcagctggcttgactcgtaccagaagtcgtagtttcctgcgtaaagctggatcttgccgtaatcgatatcggcaatctgtgtacataccttgttcaggaagtaacggtcatgggatacaacgataacagtgttgtcaaagttgatcaggaattcttccagccatgcgatcgcatcaagatccaagtggttggtaggctcgtcaagaagcaggatatccgggtttccgaacagtgcctgtgcaagaagaaccttgaccttctcagaacctgtcaggtctttcatcagtttataatgaagctctgtctcgataccaagtccgttcagaagattggcagcatcagattctgcttcccatccatccattgtagcgaactcagcttccagctcacttgctttgattccgtcttcatctgtgaaatcttcttttgcgtaaatttcttctttctctttcatgatttcatacagacgtgcatttcccatgataactgtatcaagaacagggaattcgtcatatttgaaatgatcctgctgaaggaaagaaagtctctcgcccggggagataactacatcaccggatgtcggctcaagctgtccggagagaatcttaagaaatgtagatttaccggcaccattcgcaccgatcattccgtagcagttcccctctgtgaatttgatgttaacatcttcgaacagcgcctttttcccgacgcgaagggttacgttatttgcactaatcatttgaaagtctccttgtaaataaattagaattgtgattacgttgttataattgtcctttttcaaatacgtgtgaataagaacataccaatccatatattaacatagaagaaagggtgctgacaagtactgaaatagaaaaatgcatacgaaaaagcagggcaaactgtgtgaaaatgtataagaactaatccttgttctttccattgtaaaaagttataatgttactaagaatctcacaatataaatagcagtagaaaagaggagaaaccatggcacttaagaaagcaacaatcgtactggaaggtggagcaacaagaggcatatttacttctggtgctctggattaccttatggaacaggatatttatttttcagatgtgatcggtgtgtctgccggcgcatgtaatgcagtagattatgtttccagacagccgggacgtacaagagactgtatgattccgaatagaaaagatatgaagtatattaatggagtgaaagatacgatcagggagaaaagtctgatgaatatggatttgatttttgataaatatccgaatgaactgatcccatttgattttgatgcatattttcagtcagagatgcactgtgagctggtaacgacaaactgtctgactggaaatgcagaatatatgacggaaacagaagatcctgaccgattgatgaagatctgtcgtgcatcaagcagtatgccgcttgtgactccgatggtgaatattgacggtgtcccgtatctggatggcggacttgcagattctgttccgatccgtcgtgcacagaagcttgggaatgagaagatcatagtgatcctgacgagaaatcagggctatcgtaagaaagtgatctcaccggcagtgcagaagctttacagacaggcatataagtcctatccgaatgcagtccggacaatcttcagaagaagttttatctataataagacgatgaattatctggaccagcttgagaagcgtggagagatttatgtccttcgtccacatgtaaaaccagtatcacggctcgaacagcatccggatgtcctgcatgcattttatgagcatggatatcatctgatggagcgaaagacagaagaaatgctgaagtatcttgaacagtaataaaaataaatcgacttgttaaaagaagagagaaaagggagttgagttatatgagagagattttagaagaaactcagaaccgtgaattatcgtggcttcggttcaatcagcgcgttctcgaagaagcacgggacgagacagttcctttgatggaacgtatgaaattcgtagctattttcacaagtaacttagacgagttttttatgatccgcgtaggaagtctgtatgatatggcatcagcagacagcaaaaagatcgatcagcgatctggtatgacagcaaaacagcagttagatgcaatttatcgagctgtttccccactttacaaggaacgcgataagacatatgcagagatcaagaaacagttaagtccgtatggtgtctgcggtcttgacttcaaggaactggaacagcaggagaagaagtttgtaaagaaatatttcaaagaagaagtaatgccggtgctttccccacagatcgtagatgcgaaccatccgttcccacatctgttaagtaaagaactgtatgtggttgcgaatctgaagcagggagacaagacgatgctcggaatcatcccggtaccacaatatatttctaatattctctatcttccggggtatgacatccgttatatccgtatggaaaagattatcctggaatttattgatcttgtttttgaccagtatcagatctcagacaagaactatatccgtgtaacaagaaatgcagatgtatcaccggatgatgaagcttatgcagatagcggagatttccgtcatgtgatgcaggagacacttcataagagaagaaggatggctgttgtccgtcttgaggcagccaattctctgagtaaagagatggagaaatatttctgtgagaaattcaatatccgtccggaatgtattttccgaacaaagatgccgatgaagctggactttatctttgcaatcgctgataaacttccggattcgaagaaaaaaacgctcgtggatgtaccattttctccgcagccgtcttccatgcttgcagagggtaaggtgattccgcagataaagaagaaagatgtactcctttgctatccatacgaaagcatggaaccgttcctccagctgatcaaagaagcatcaacagacccggaagttctgacgatcaagatcacaatctaccgtctggcgaagaaagcacgacttgtagaatatctctgtgcagcggctgagaatggaaaagaggttacggtcctgatcgagctgagagcacgttttgatgagcagaacaacattgactggtccgagcgtctggaagaggctggatgccgtgttctgtacggattcgagggttataaggtacactccaagatttgcctgatcacatacagaaaccgtaccggaattcattacattacacagattggaaccggaaattataacgaaaagacagcgaagatgtataccgattactcgctgatgacaagcagacaagagattggtgaagacgcagcagtctttttccagaatatgtcgatcagtaatctgaatggagtttacaagcatctgattgtttcaccgacaagcctgaaacagaaagtacttgccttgatggatgaagaaattgcaaaaggtgagaacggaagaatcattatgaaaatgaattctgttacggacatggatttcattcgaaaagtaacagaagcatctcaggcaggggtgaagatagatctgatcgtgcgtgggatctgctgtatcctcccgggaatcaagggaaagacagagaatctgcgtgtgacaagtatcgtcggaagatatctggagcatccaagacttttcgtcttcggaaaaggagcagatgcaacagtttatattggatctgctgatatgatgacaagaaatacagagaagcgtgtagaagtcgcgtgcccggtctatgatgtagagatccggaaacgcctgttccatcagcttcatgtaatgctttctgacaatgtgaaagctcgcgcgatgacaagtgacggaacatatgtgaagaaaccggtggaagacggagcaagtcttgtgaatgcacaggagacctttatgagagaagcatcacaggcacaacgtccggctgcagccaatgtgccgaagaagaaaaaagaaggattcttaacaaccgtacggaagattttcagaaaaaaacaatagaaggacgagagatggaggagcagagaaagatgaaaccgttacagaaaaaagactttggaaagacatcgaaaggggaattggctaccgtatatacactggaaaatgaagccggaatgcagatcagtgtatccgacttcggagcaacactgacaagcgtacttgttccggataaggataacaatccggtagaagtgacacttggatatgatgatgcaaccggatatgaagccggacttggaaatgcattcggagcatctgttggacgtaacgcaaatcgtatcggtggggcagtgatcgagatcaatggaacagaatatcacctgacaaagaatgacggagagaacaacttacacagcggacttgatttctatcacggaagattgtggaaggttgcggacgcagatgatacccatgtaacatttgagatggacagcccggatggagatcagggatatccgggagcacttgttatgaaagtgacgtattccctggatgaagagaatactttgatgatccactacgaagcagaaccggatcaggatacgatcatcaatatgacaaatcacagttactttaacctgaacggacataagagcggagatgttctgaatcatacattatggctgaatgcagatgcatttacaccggcagacgcagcatccattccgacaggtgagatccgcagtgtggaaggaactccgatggatttcagaatagataagacaatcggaaaagacattgaagcagattatgaaccgctggtattcggaaaaggttatgaccacaactgggtattgaaaaatgaaggcgaatttgataaagtagcagaagtggccggggatgaaagtggaatccatatgagtgtactgacagaccttccgggagtgcagatctatactgcgaacttccttgacggagtgaaaggaagagacggagcggtttatgagatgagagatgcgatctgtctggagacacagtactatccggatgcaatccaccatgaaaacttcccgggaccgatctgtaagaaaggcgagaaatatgatactcgtactgcctacagattccgtgtaaaataatggaatggaagataaataattaatttatgggaaaatcagtatacattgcggagaaaccgagcgttgcccaggaattcgcaaaagcattgaaactaaatacgaaaagacgggacggatatcttgagtcagacgaagccattgtcacctggtgcgtcggccatctggtgacgatgagctatccggaggaatatgatccggcacttaagagatggaacctgcagacactgccatttatcccggaagaattcaaatacgaagtcattccgtcagtggcaaagcagttccagatcgtcagtgggatcctgaaccgggaagatgtcgatacgatctatgtctgtaccgactccgggcgagagggagaatatatctatcgtctcgtagaacaggaagcacacgttgagggaaaaaagcgacggagagtgtggatcgattcccagacagaagaagaaatcttacgaggaatccgtgaagccaaagatctgtcagagtatgataacctcggagcatctgcatacctgcgcgccaaagaagattatctgatgggaatcaacttttcccgtctgctgactttgaaatatggcaatagtatttcaaattttctgcaaacgaagtattccgttgtatctgtaggacgtgttatgacgtgtgttcttggcatggttgtgcgcagagaacgcgagatccgtgatttcgtcaagacaccgttttaccgcgtacttagcacgatcgatgcacagggacatacgttcgagggtgagtggagagcagtgaaaggctcccgctattttgagtcctatgacctttataaggaaaatggattcaaggagcgcaagaaagcagaagaattgattcaatacctgcagacaccggatgacgagtctgtaaatgtagcaggaatacagggacaggcaggattgaactgcaggatcgagtcgattgagaaaaagaaagagaagaagaatccccctcttttatataacctggcggagcttcagaacgactgttctaagagatttaagatcagtccggatgagacactgcgaatcgtgcaggagctgtatgagaaaaaacttgtgacttatccgagaaccgatgcccgtgttctgtctaccgcagtggcaaaggaaattacaagaaatctgaacgggctgtcaaagtatccgatggcggcaccgtatatgcaggatatcctgaatttcggaagctataagacacttgcaaagacacgctatgtgaatgacaagcagatcacagaccattatgcaatcattcctacaggacaagggttgaatgcattgagtactgtttcatctactgcgaagggtgtgtacgacctgatcgtgcgaagattcctgagtatcttttatccgccggcagtttaccagaaggttgctatcgtgacgaagatcaaagaagaaagtttcttctcaagcttcaaagtacttgctgaggaaggttatctgaaagtggcaggcattccgaagaagaaagcttctcagacagccacaaaagatagcagtaatggaaacagtgagaataataacaatgatacaaatgacgaggcaggttccgattcttccgatcaaagcctggacaccggattgttcgaagtggtcaagtcattaaagaagggtgcagtccttcaggtcagagcattggatatcaaagaaggagagacatcacctccgaagcgttacaattccggttccatgatcctggcaatggagaatgcaggacagctgatcgaggacgaagaacttcgtgcccagatcaaaggaagcggaatcggaacaagtgcgacaagagcagagattctgaaaaagcttgtgaatatcaagtatctcgcattgaacaagaagacacaggtgatcacaccgacgctgcagggagagatgatctatgatgttgttgatcattccatccggtcactcctgaacccggaacttacagcaagctgggagaaggggctgaactatgtggcagaaggttccatcacatcagatgaatatatgagaaaactcgatcatttcatcaccagcagaaccgttggggtgaaaggactgaacaatcaatatcaactcagagcctgctatgaaaaagcagcaggattctatccgtctgtaaataataataataatacgacaggcagaacaaaaacaggcagcagaagtaaatgacacaataataagacataaatgtaagtcggttctaaccggcagaaaggaattaccatgttagaagcattaacagtaaaagaaaattattcattagaccagacaatcgcaaaagatatcttcaacggagttacttatccgtgggaagtacttccgaagatcagcaacttcatccttgaacttggagctacattgagcgaggatgaatacgagaaacgcggagaaaatgtatgggtagcgaagtctgcaaaggttgctccgactgcatttatcaatggaccggcaatcatcggaaaggatgctgaggttcgtcactgtgcatttatccgtggaaatgcgatcgtaggagaaggagctgttgtaggaaattccacagagcttaagaacgtgatcctttttaataaagttcaggttccgcactataattatgtaggtgattctgttcttggatacaaatctcatatgggagccggatcaattacatctaacgtaaaatcagataagaaacttgttgtggtaaaagccggagaagagaagattgagacaggcatgaagaagttcggcgcaatgctcggagatgaagtagaagtaggatgcggaagcgttctgaatccgggaacagttgttggaaatcacagcaacatctatccactttcttctgtacgtggattcgttccggcaaacagcatttacaaaaaacagggcgaagttgtgacaaaagaagaaagatagttgaaaatagaaaatgataagaatggctcctgtgtgataacatgggagctatcttagacaggaggaataaagcagatgaataaagtgggttttatcggtgtaggaatcatgggaaaatccatggtcagaaatctcatgaaagccggatttgaattacatatctatgcaagaacaaagagtaaagtagaagatgtgatcagcgaaggagcacagttccatgagtcaatcaaggattgcgtgcaggattgtgatgcagttattacgatcgttgggttcccacaggatgtagaagaagtatactttgatgaggggaatatcttagacagtgcaaagaaaggtgcttatctgatcgatatgacaacaacaagtccgcagattgctgagaagatttacgaggaaggtacaaaacgaggtttccatgtgatggatgcacctgtcacaggcggagatacaggagcgaaagccggaacattatccattctcgttggtggagaaaaggaagattacgaagcctgtatgtcactctttgaggcaatgggaacaaacattaattatcagggtaaggctggatgcggacagcactgcaagctggcgaaccagatcatgatcgccggaacactgtccggtgtgtgcgaggcacttacttatgcaaaagaacagggactggatccggaagtattcatgaagtccgttgcgacaggggcagcaggaagcaagcagcttgacacattcggaccaaagatcttaaaagatgattatgcaccgggattctttatgaaacacttcatcaaagatatgaagcttgcactgatcgaagcgaacagaaaaggactttcccttgatgtactcagtatggttcttgccaattacgaagaacttgagcaggaaggatacggagatctcggaacacaggcgttgatgaaattctatgatgaagaacatcgaaatacggaagagtaaaaatttgtgaatggtaaccgtaaaaattctgttaagaatcaacaaaacaggttgaagtaacagggaaaagaaaatataatagacatcagagaaaaaactgttgaagaatataaaaatcaacaacaggaagacttgaaggaggacacgaaaatgcttacagataattttgtaacaatggaaattggaaaagcaaaacacattgcactcgtagcccatgatggaaagaagaaagaactgattgaatggtgtgatagaaataaagaagtattacagggacatttcctatgcggaacaggaacaacagcccgtctgatcgcagagaaaacaggacttccggtaaaaggatactgcagtggtccacttggtggagaccagcagatcggtgcgaagattgtagaaggacagattgatttcatgatctttttgtgggatccgttagaggcacagccacatgacccggacgttaaggcacttcttagaatcgcagtagtatatgatattccggttgcgaacaaccttgcaacagcagacttcatgctgaatagcaagttcatgaatgagccttattccagacagattgagaatttcaataagacgattcaggaccgcgttgcggagatgaaataaaataatttaagtattaaaaaaatacctgcagatatcaattttgacatcttgcaggtatttttatggatttttacagaagtcctttttcacgcttctcaagaagagcatgaatcttatctgtcgggctgataacagagctgatcggcacatcatggttcagggaatcaatgatcagtgcgataaatttactcatatcagcttttacaaagtaaggtttctcataaagttccggtgggagatatgtaaggtttgttgtaataactttactgatatatcctttattataatattcatcgaatttatcaaatccgtctgtgaatagtccgaatgttgtacatacgaagacacgtccggcgttacgatctttcagctgttttgcaacatcaagcatactttctccggaagagatcatatcgtcaacgataagaacatcctttcctgttacgtcatcaccgaggaactcatgggcaacgatcgggttctttccgtttacaactgtagagtagtcacgacgcttgtagaacatacccatatcaacaccaagtacgttagagaagtaaaccgcacggtgcatagctccttcatccgggctgatgatcatcagatgttctttgtcagctttcagatccggtacctcacggaacagtgcttttaagaactgatactgtgggttaaagctgtcaaatccactaagtggaatcgcattctgtacacgtgggtcatgagcgtcaaatgtaatgatattggaaacgcccattgcgtccagttcttccagtgcaagagcacagtccaaagactctcttcttgtacgcttgtgttgtctgctttcgtaaaggaaaggcatgataacattgatacggcgagccttacctgttgcagcagcgataattctcttcagatcctgataatggtcatccggagacatatggttaagatgtccgtttactgtgtaagtcaggctgtagttgcatacatcagtcatgataaaaagatcagtaccacggattgtctctttcaggacacccttagcttcaccggaaccgaatctcggacaactacagtctacctggtaattgttggccttatagtttctgtaaagtggggattctgttacttcgttgatcgtgttctcacggaaggaaacaatataatcatttaccttctgtcccagaggtttgcaactctccatagcaatcagtttcagaggtgcaatcgggagtgtgttttctaacatttcgatgttcgtcattttcttctcctcagtgtgaattagtttttaaccgtcttaagaaatcagacagtaacgtgaattgattaattagaattaacagattaatcattatacatttaacgttataccatttttcaggagaaaattcaaggagggcagggcggagagtggacgataaaatgtattttttacagaacaagacagaaaataacaaacttgccttttataaggtgcaatggtagaatcttaagtaggaaaatgtgcaggacaaaaaggagcgatgatatgccgaaagtattcaataatcaagtatttattgattttttggcacaattaagacctgatgaacaacatcagtataacagtccatggaatattgcagcagagtttaatattgatatgagctgtccgcatgcttttatcagaagaaagaaatcggagtgcagcaggtagaagtggattctaagatgatcatagaagctgtggtataagaaaagaaaaataaaagaaataaaaagagctttaatatctgaacgatacagtggtattgcggaagatattaaggctctttttatgtgtaagggaaatggtaactgtccagagccaacctccaaaatgctatgcattttaaacctgttttttgaaatttgcttggctctgaacagttataaatttcgtagagtatacaactctacgaattcctttatagttaatttacggtttaaaaagactttaatcattgatatcttactctcattatacgttcaagtcaaggcagaaatgtcgaaatttgtgtattcttatcaataatacgcaaaaaattaatcgttttcatcacacatcactgcttattttttttgtgattattgacttatttaccgtcaaaaaaatggtcaaaatggaggagaaaaacatgccacgaagaggagaaaatatttacaaaaggaaggacggtcgctgggaagccagatacatttatgcattcaaagaagatggaagtcccagataccgttctatctatgcagcggattatttaactgttaagaaaaagcaaaatgatgcaaagagaaaaatggatccacgtctttttcaaagtgtccgtatgaagaagaacatttccttttatggattgctctggctggaacgactgaagccttccagcaaggaatctacttatgtaagataccattatcttttcagccactatatcagtcctataattggtgatcgccttgtctatacgttcagtaataaagattgtgaagtatttctgaacaagttgttgctttcaggaaaaagtgatggttccggattggctccgaaaacagttaccgatatccgttctgttgtcaaattaattctaaagactgctgaaaaggaaggtgagctatctctttgtaatccggaactttgtcctgttaagcccgtcaaaaaaccgcttcgaatcctctctttaaaggaacagcaggccttgcaggactacttattggggaatctgacacataaaaacatcggaacgctgattgcactatatacaggagtacgtcttggggaactttgtgcaatgcagtggaaagatattcattttcaggaacaatatctggagatatctaagactttacacagagttaaagatcacacagatgattcggaacataatacaaaaatcattatcactccaccaaaaacagaaagctccatccgtaatattccgattccggatttcctgtttgagatcttgcagcaatacgtccaatctcacacgatagatcctgaagcatatatcctcactggaaagaagatgagttttcgcgagccgcggtcgatcgaatattatttcaaaaaaactttgaaaaaatgtcaaatcgaaccacttcattttcattgtctgcgacatacttttgcaacacgttgcgtagaacttgggttcgatatgaagacattaagtgagattttaggacactccaatattaacacaactctaaaccggtatgtacatccttctatggagcagaaacagcaaaacatggataagctaaacgctgtatttaccgtcaaataattggtcatatcttttaaaaaccccataaattcaacttaatttcatttttttcgtagagttgtatactctacgaaaaaatataggggagaataatgggaagaaagcctcaagatcttacaggaaggcagttcggccttcttacagcaatgtatccaactgaacaaagagataaacgaggatctgtttattggcattgtgtctgcaaatgtggaaatacaattgacgtgccggcagcagggttgatccatgcacacaatcgaagctgtggctgtttaaaagaccagaatcagaaagcaattgcggatcgcagacatctggtagatggaacttgcgttgaagtattagagaagagaaaaaaacgcagagataacgagagtggttttcgaggtgtgttccgattaaaaaacagcaatcgataccgtgttgatatcggtttcaagggaaagcgttattatgttggtctctttgatgattacgacgaagcagtccaggccagacttaaagcggagaacctgatacataatggttttgttaaagtatggaaagaatggaaccaaaaggaacaggaagatccagagtgggggaaagaacatccgctggtattcaatgtcagcaaagtagacggagagttacaggtagaagcaggatgcagataagtcaatctacaagaaaagggagaaaagtatgaaaggtattatcttagcaggtggatcaggcactcgtctgtatccgttgaccatggtgacaagtaaacagcttttgccgatttatgacaaacctatgatctattatccaatgtcagttcttatgaatgcaggcattcgagacattttaattatttcgacaccacaggacaccccaagattcaaaagtttattaggaggtgggcatcagttcggagtcaacttgacatatgaggttcagccatcaccggacggactggcacaggcatttattatcggagcggattttataggagatgattctgtggcgatggttcttggtgataacatctttgcaggacacggactcaagaaacgtctgaaagcagcagtggataatgcggaaaatggaaaaggtgcgactgtctttggatattacgtagacgatccggaacgttttggaatcgtggagtttgataacgaaggaaaagcgatttcaatcgaagaaaaaccagaatacccaaagagtaattactgtgtaacaggattgtatttctatgataaccgtgtggttgagtatgcaaagaatttaaagccatccgcacgtggagaactggagatcacagacctgaaccgtatttatttggaagaaggcagcctgaatgtagaacttctcggacagggatttacctggctggatacaggaacacatgagagtcttgtagatgctactaatttcgtaaaaacagttgagcagcatcagcatcgtaagattgcatgtctggaagaaatcgcatatctgaatggatggatcagtaaagatgagttgacggaagtttatgaagtaatgaggaagaatcagtatggacaatatctgaaagatgttatggatgggaaatatagagagcatctctactgatttgaacgaatactgaaagtgagataaagaaaagatcgaggtcatttccataggaattgaaaacgagagagacgaggagaaccaagaacatgaacattattgttaccggaggagctggatttattggaagtaactttgtattccatatgttaaacaaatatccagattacagaatcatctgtctggataagctgacttatgctggaaatctttccacactggaaccagtgatggacaacccgaatttccgctttgtaaaagcagatatctgtgacagggaagcagtaaataaattgtttgaagaagagcatccagacgttgttgttaactttgcagcagagtctcatgtagaccgttctatcgaaaaccctggaatcttccttgagaccaatatcatgggaacacagacactgatggatgcatgccgtaaatacggaatcaagagatatcatcaggtatctacagatgaagtatatggagatcttccactggatcgtccggatttgttcttcacagaggaaacaccgattcatacaagttcaccatacagcagttctaaggcaggagctgaccttcttgtactggcatatcaccgtacatatggactgcctgtaacaatcagccgctgctctaataactacggaccatatcacttcccggagaagctgattccgctcatgattgcaaatgcattagcagataagccacttccagtatatggagaaggtctgaatgtgcgtgattggttatatgtagaagatcactgcaaagcaatcgatctgattattcacaatggtcgtgttggagaagtatataacgttggtggacacaatgagaaacagaatatcgagatcgtaaagattatctgtaaagagcttggaaaaccagaatcactgatcactcatgtcggagaccgtaaaggtcatgatatgcgttacgcgatcgatccgacaaagattcataacgagcttggatggcttcctgagacaaagtttgaagatggaatcaagaagacaatccagtggtatctcgataatcgtgactggtgggagacaatcatcagtggcgagtatcagaactattacgacaagatgtacagcaaccgctaagtaacaatagattaaccggaggaagaaacagaatgaagttttttgtaacaggtgtcggcggtcagcttggacatgatgtgatgaatgaactgttgggaagaggacatgaaggtgttggttctgacattcagaaaatctacagtggtgtagctgatggttctgaagtaacgaaagcaccttatgtatctttagatatcacagataaagaagcagttgaaaaaacaattacagagattcatccggatgccgtgatccactgtgcggcatggacagctgtggatctggcagaggatgaagaaaaacaggagaaagtccgtgccattaatgcagggggaacacagaatatagcagaagtctgcaagaaattggactgcaagatgacatatatcagtacggattatgtatttgatggtcagggaacagagccttgggaaccagactgtaaagcgtatgctcctttgaacgtatatggaaagacaaaattagagggagagttagctgttagcgaaacattggagaaatacttcattgtccgcattgcttgggtgttcggtctgaatggaaagaattttatcaagacgatgctgaatgtaggtaagaaccacgacacagttcgtgtggtaaatgaccagattggtacgccgacttatacgtatgatttggcaaggctgctggttgatatgaacgaatcagaaaagtatggatactatcatgcaacaaatgagggcggctatatcagctggtatgactttacaaaagagatttaccgtcaggcaggatatacaacagaagtactcccgataacaacagcggagtacggattaagtaaagcagctcgaccattcaacagccgattagagaaaaacaaacttgtagaagctggttttaaacctttgccaacctggcaggatgcgctgagccgttatctcaaagaaatagaagaatagaaacaaagtgggagttaagtgtaatgggacaaattacagttgagaaaaatgtaggaggaatcgaaggactgtgtgtgatcactccggcagtacatggagatgcacgtggatacttcatggaaacttacaatgagaatgacatgaaagaggcagggattggtatcaagtttgtgcaggataatcagtccatgtctacaaaaggtgtgctgagaggactgcattttcagaaacagtatccacagacaaagctggttcgtgcgattaaaggatctgtatttgatgttgcagtggatttgcgtgcaggaagtgaaacatatggcaaatggtatggaatcgaactgacagaagagaataaaaagcagtttttaattccaagaggatttgcacatggatttttagtgctaagcgagacagcagagttctgctataagtgtgatgacttctatcatccgaacgatgaaggcggaatagcatggaatgatccggggattggaattaaatggccacaggtgaatggcgaatatcaaggaagtgcaagtgctgaagggtataatctggcagatggtacgaagttgaacctgagcgagaaggatcagaaatggacaggagtgaacggaatgatacgttcaagttttagctttgagtgaaatacacgtacaaaagaatttgaagcctctcctaagagttaatgtcaaggagtaacaaaggcttatagatctggaacaaaccatctgttaggtgggggatgattctcatattggatatacaagaatttatagaagaagtggatgcaaaatatgaaaatagcaatgtttgggcataaaaggattccttcaagagaaggaggtgtggaaatagtagtagaagaactagcattaaggttagtagaactaggaaatcaagttgtatgttataatagaagaaagcaatatgatagggaatatgatttcaatggaattaagataaaaagtgttccaacacttgatagaaaagggcttgcagcagtttcatcctctttttttgcagcaattttatcagctataggcgactatgatatagtacatattcatgcagaaggaccagctttttttgcatggattcctaaattatttaataaaaaaattattgttacaattcatggattggattggcagcgagaaaaatggagaggtagattttgttcatggtttatacaaaaaggtgaagttaatgcagtaaaatatgcggatgaaataattgtattgagtgaaaatatgaaagaatatttcaaaaagaaatataatagaaatacacattttatacctaatggagtgaatttacctgaagtaagaaaagcggatcagatagaacaactatatagtataaaaaaagatggttatattttgtttttagggagacttgtaccagaaaaaggaatttcatatttaatagatagttttttagaagtaaatacaaatatgaagcttgtaatagctgggggaagcagtgatactcctgaatatgaaagggaaataaaaaacaaagcaaaaaaagattctagaattttatttacaggatttgttcaaggtagtttactggaagaattatatagcaatgcttatttatatgtattaccttccgatttggaaggaatgccgttaagtttattagaagcaatgagttatggaaattgttgtcttgtttcggacatcaaggagttaacagaagtagttgaagataaaggagtaatattttcaaaaggagatattgctatgcttactaataaattacagaatttgtgcgaccatcctgaagtggttaaaaagtataaaaaagatgttgaaaattttatttgcgaaaaatataattggaattctattacgaataaaacattggaattatatgaacagacaaggaaaccagctttgaaaaattaaattggaattaaggaaataaggttttcgctgatcagaaaacgacaatacacgatagtgaatagtcattatcatataaaatatttaaaggtactaacctagaaaaaatgaaaggaaatatgatgttgtttctaacaacattatagaagtaaatgaaaactagattaataatacaaattccatctaaaaaacgcatggttgtttttatgcaaatattatatatacattttatgttatggataagagatatattaggtttaccatttgcaataacttatcttacagatattcttacaatatatatgattgtatttcatttttttagtataaaaaagggatttttaaaacgtgatttaagaccgcaaagaaatattgctatatctattcttatatgcatgatattaggcacgatgattaatttagtaaatccgctactcgtcttgtgggggttgcgaaacagtttccgctttttcattttcttttttatatgtgtgggtatattgacaaaaaaagatataataaaatttgtcgaatttttcaagatattttttttgatgaatactttgatgattacatatcaattttttatacaaggatacagggatgatttgcttggtggattttttggcgtatcagcaggatgtaatgcatatgtgtgtgttatgttatgcgtgattacgacaattgtttttgcagaatttaattattctaaaatgtcaccaattaagttagtaggatattgtattatatgtatgtatattgcaactttgtgtgaattgaaaatttattttgtggaatttataatcatagcatttattcagagtatatacacacgtccttcaaagaaaacgattggaatttatatagcagcatttgttggtttgataataggatttaatctaattagccgatataatcctgaaattttgaaaatatttttgtacaaggatgcgatggattattatttgtctggaaacggatatacgaattcaggagatttaaatcgtctaactgcgattcaggaactttatagcaaattcttcaaaggagatattatacatacattatttggatttggactaggaaattgcgaacaatccagcttttcgtttttacagagtgcattttataatcaatattcatatttacattatagatggttttcacacgcatggatatttttagagcaaggcgcaattgggttggtattgacaggagcgtttttcctttctattgcactgtcaatcttaaaaaacagaaagaaaataaaggaagtatatgatttggcagtattttctttcataccaacgtgtttaattggattgatttataattgtgcacttgagttagaagtttcttatcttattgcattaatttgtgcatttccgtttattgcaagaaagaatgacaagtaaaaagacaggaaaaatcatgttagatacaaaaaataaattaaaagagtgtctgaaaagagaaaaaaaatattatatcacagggaaaaaaagacacgatcagctagtagaatggttagtgaatgatccgagtgtaagaatctggaaatatcagaaagctttgcgctatacagaatattatttttgtcagaagggaattaaaagactgccttatttgtggtacagaagcaaacgaaatcgtttaggattaaaaataggatttgaaatggtagaaggagtatttgaaccaggattggtaatatatcattctggcaacattgttgtgaatggctttgcacgtgttggtgaggattgtcagcttcatggagataattgtattggaaataatggcacgacattggaggcaccacgtgtaggaaatagagtagatattggcgtaggagctaaaattatcggtaatgtagagattgctgatgatattaaaattggcgcaggtgcagtggtgacaaaatcgtttttaacgccaggagttacgcttgtagggattccggcaagaatactaaaaaagggagaaagtcaaataggtgaatgaggaaaagaatcgtgaagaggtacttttatcaatcattgtaccagtatataatgttgaaaaatatttaaaggaatgtgtggacagcttattgcatcaaacattaagccagtatgaagtaatcttagtagatgatgggtcgacagactccagtgggaaaatatgtgataggtatgcgtcaaaggacacacgcataaaagttgtacataaaaaaaatggagggctttcgtcagcaaggaatgctggtttggatgttgcaaaaggacgatatataggttttgttgacggtgatgactatattttgccggatatgtatgaaaggttgattacagaactagaattaaatcatgcagaaattgcggtatgcagatattttacctttagagaatacaaagatttaaaaaaatgtatacgtagaaaaaagaaatataaaaaaagagtatatacaacagaagaaacattgaaacacttttttttacgtaatatttcggaaagtgtatgtgataaagtttatgtcacagaagtatggaaaaagtgcagatttgttgaaggtgaaataaatgaagacacgaatgtagtgtatgggatgttaaaatgttcttcaaaaacagtgtgtttagattcaaaaatgtatggatacagacaaagaaaaggaagtattacaaaatcaggttactctgctaaatttaaagttgtggaaaagcatttggaagagttggagaactcagctactagcgagtatccgcaactagcaaaatatgttaaacaatttttgagtatacattattattgtctgctaaatgctataaggcacagcgaagaaccatggaaatatgaaaaggaatattatcagtataggatgaggtttcaggagaatttttcatattttctaaagcgaaaacaattcagtttaaaggactgtatcattgcaatgatgctggttagtccttttgatataatagggaaaaggattagcaaaaatgaaagaaaaagtagatgattttttgatttcagttattattccagcatacaatgcagaaaaatatataaatagatgtataagcagtgttttaaaacaaacgtataaattttatgaaattattattgtaaatgacggatcgacagatcgcacaaaagaaatatgtgagaaatttgtaggtgcttataaaggattcacacttattaattcagaaaacagaggtgtaagtggagctagaaatcttggattgcagaaggcatccggaagatatgtgttttttttggatgcagatgacatgattttcccagatgctttagaaacattggctacaaatgtggcgaatactgattgggttatcggaaattttgtttcatataatcaaaagatgagaactcaaaagtgtaacttacaatattttcaggaaaagattcataaaggtataccggatgaacttccagaactggtgaagagcagaaattttcattttgtgtggggaaaattgtatgataaaaatattataaaagagaagggcttattgtttgatagatcatataattatggcgaggatttattgtttaatctgaattatttcatacatattaataattttgttgttactcaaaaagtggtgtataagtattattaccatttggattcagggttaagtcatagcgtggaaatggatgaatggaaaattcaaaaatgtttatgcgaaaatgtagaagaaacattaaatatgtgtagtcatttgaaagatgatacaaaagaaaaaatgaatcatttttattattcacaatgtattgcttctgtagaaagggcaattttgttgaaagataataagaaaatatatgagattttatcgtcgcaatattttcagaaggttctgaaacaggaaaaaaatgccggaagaataaaaaaaatagattatatcttattaaaaaatcattttggtaaagtatattatacgttgcataagatttatgtgtttttaaaggaaacggggagtaagtgtattggataagataagtattattgtacctgtttacaatagtgaaaaatatattaaaagatgtatcatgtcagtacttgatcaaaatccagtccgttgtcagttggtattagttgatgatggatcgtcagataattcattgaaaataatgcagcagtttgcagcgcaatatgagtttgtcaaactaattcatcaagaaaatcagggggtaagtgctgcaaggaatactggaataaaggcagctacgggagaatgggtatactttttagattctgatgatgagatggttccaggttctttgaataaaataatcgaatttacggaacaagatgttcaatggattttgtttaattattataagaaaatagaaggtaaagataaaaaaatcaaaaatagtatttctgcaaataatatggagtatcatcttggaaaagaagagtttccaagattattaaatgaacaaatatttatgcttcaatgcggaaaggttttccgcagagacattatagaaaataataacatacattttcaggataaagtagtgtatggggaagatataagatttaatttagcatattttcagtatgtaaagaagtatattttgtctgacattcctgtattcatatatcatatacgtctaggaatgggtgcaggaagtgcttattataaagactctttccaaatgcagatggatattgataaagagattatgtacatggtagagaaccactataagttaagtacttcagcgaaaaaagaattaaacaggtatttttactatcagggaattaatacggcagcggcatactggactgtatggaaagatatttccatgaaagaacgttttcatgaaattgacaaaataatgagagatgatagatttgttgattttctcgagaaacaaaaggaatataatgatattaataaattggattattttattttaaaaaacagaaagtttgttctttactattgtattcactatatatacaccaagttgaagcagttaaaacgaaaaggaaattgatatatgaaggcgggtattgttaccattacaaatggatataattatggaaatcgtctgcaaaattatgctgttcaggaatcactgaaaagtattgggatagaggcagaaacaatttggaaaaatacgaatgtatttgatatagaaaatacgaaatatctttttaaattatatttaaaaaaaattctacattatcatttgacaaaagaagagaacagagtacttaattttcatagatttaatagaaagtatatttgtaaaagtaaatttataatagatgaaacaattccagaaggactggatggggcgtatgattattttattgccggcagtgaccaggtttggaatccgtatttagcatactgtacagaagctaattttttaacctttacacaaactaaaaagaaagtggcaatctctccaagtattgcatgtgatgcaataccaaaggaaaaaatagatgagtttacagaatggataaaggattttcaatttctgtctgtgcgagaagaaaaaggtgcagagattatagaacagttatgcaagcgaaaagcggaggttttatgtgatccaactatgtttatttcagcagaaaactggagacgaatagcaaaacgtccgaaaaaaatagcatcgaaatatcttttgatgtattttttgggagaatgtaacagtgtttcccgagaatggattagagtgctggcagaaagaaatcatttacaagttattgaattacaaaatgaaaaaaattttggaattgcaccagatgaatttatatatttaatagatcatgctgcatgcgtatgtacagattcatttcatggaagcgtattttctttgattttgcatactccatttgttgtatttgagcgagaagaaaattttgaaaagatgaattccagactagatacattgttatcgaaaatgcaatgttcagaacgtaaaaaaatgaatattgatatgagcaatgcgttatttatgagattcgataagagcgatgcggcaatctacaaggaacagaaaaaatataagaattttttgagaaaaattctagaggagaataaataaatgaataaaaaagtaaatcagctgaaaatgggaacgttgctcagttatgttacaattattattcaaaatttgtgcgcaattatatatactccgactatgttacgattattggggcaaaatgaatatggactttaccagttggggagttctacagtatcatatctgggactgctaagttttggatttggaagttcttatatgaagttttattttggatataaggtaaagaatcaggaagaagaaatacgaaaattaaacagtatttttttacttgtattcttaggattggcagctttatcatgtgtagcaggtagtgggatgatagcctctgcagataagatttttggtagcagtctttcggcagcagacgtgaaacaagtccaaaagttgatgttgattttagtgatttcaatggcagttacatttcctaatattatttttgaatgttatatgaccgctcacgagagatatatatttcaaagaattatgctaatagcagttactgttttaaatccatttatcacattaccattacttttaatgggatatcgttctactgtattagttgcagcaaatttgatattaacgttgtttagaactggaatgaatatatactactgtatgtttaaattgcatatgaagtttcaatttcatggaatgcaattaaacgtattaaaaaacgtgggaacattttcactgtatatatttttaaatgaaattgccacacagattaatttgaatgttgataaggtgatactgggagctgttcagggagccagtgttgtggctatatattcggtaggaagtcagtttaatcaatattttattagtatgtcaacagcagtttcaaatgtttttattccgcgggtaaataagatgattgcagaaaaacaaggagatgagatacttaataaattatttgtaagaattgggagaattcagtatattattttatcagctgtcttaaccggatatttgttatatggaaaattttttatacgtaaatgggctggagaaggatatgatgctgcttattacgtaggagcaatggttatgattccatacatagttccattaattcaaaatattggaattgaaatacaaagggccaaaaatatgcataagttcagatcaatcatatatttcattatagcttttgcaaatcttggaatcagcattccgcttggaaagtattatggtgcagttggaactacttttggaacaacactttctacaattattggaaatattatattaatgaattggtattatcataaaaaagtaggactgaatataatcgaatttataaaaagtatgattcaaccatcgatttcgcttatcatagctgtaataataggagtaagtgtacggagggtattcccagtggattcgtgggcagcctttttaagtcaggcagggctgtttctcggaatttatgcaatattactttatttgattggattgaataatgatgagaaaacaattgttaaacaaatgttcagacaaaaaaatatataaaataacagataaaagacactgtacgggatgtggcgcatgtgccaatgcgtgtccgattggatgtattgttatgacaagagatgaagaaggatttttatatccttcgattgatgaaaaattgtgtatatcttgcggtgtatgtaagaaaatatgtcactcaagcgtcagtgagccaacagaagaatatgaggtttatgctttgtacaataaagatgaagaggcgagaaaaaaagcttcttcaggaggaatctttgaggtaattgccaaagaaattctgaaaaataatggtattgtatttggtgtgaaaatggatggtttgaaagctattcatacttatattgagaaagaagaagatctggatttattgataggctctaaatatatacagagtaatgttggtaatacatacaagttggtgaaaagatttcttgaacagggcaaaacagtattatacagtgggacaccttgtcagatacaagcactttataaaatattagggaaggaatatgagaatttatatacagtagattttgtttgtcatggtgtgagttctccaaaaatatttgaaaaatatattcaagaagtgctaaaaatagaggacacaataaagagtattcgatttcgagataagacagaaggctggtctgatttttctatgtatatagaaagtacagggggagtggaataccgaaaaactatgcatgacgatgtttatttacagtcatttttaaaaaatcttaatttgcgtagatcttgtttttcttgtacttgcaggaccatacacagagtcagcaatataacattgggagatctttgggggtgcagtgaaatttattcggattggagtgaagagaaaggatattcgatggctatcattcaggatctgaaagggaaacagctttttcaagaaatgaaggagcaagtgatatataggatgctggaaatcgataaagtaatttcttataatcagagtatgatttcttctccatgggatgaagtttctagagacttgttctttcgatatgtgaagaaagaatcattggaaaaaagtatagagaaagcgaaagaagaaggattaaagaaaaaagtattgaggaaatggtggaagatatgcagaaagatgaaagtatagtgagaaataatgcaattgacataatgaaaattattgcttcatttttggttgtaggcgttcatgcgggacttttagaagaaatttcaccgcagacagcatatttgataaatagtgtgtttggtaggatggcggtccctttttttgcgtgtgtgacaggatattttttgtcaaatcatgaaagaaagaataacaatgcatggaaaagaaatatcaaatcactattaaaatattatgtgatatttagtgttatttatcttgcatgggattttatcaatcataattttcaaggcatgtcgtttgtagatttttctatcacaataataaaaagattttttatatatggcacgtattatcatctctggttttttccatgtatgatagcggcagttactgtacttcatttttgtataaagtggaaaaaagaaaaattattatggttcttttctgctatcctatatgtattcggggtgtttacctatacctggtatggcgtgatccaaggaagaagttggattatagacagattgatggaatcatttgattttatttatatcagacgttttattacagctatactgccttttgtattacttggaaattatatttctgagagagaaataaaaaagaaaaggacaactagttttgcagagaaaagcccgtgtattgctttattcttagcaattatattgaacggtgttgaaatagaagttgcaacatgtttgggaatgataaatggaatgacaggaagcttcggtttgatattcgtcatttattttttgtttcttacactattaaaccatccactggacaaaactggtgcgtataaaatcggaaaatattgtcgaaatgcttccgttatgatatatggattgcatccaattatattagaagcaataaagaaaagaacagcattttcaggaactgtattatggataattaccattattttaatctgtgttatcacatatattttagataaaggattaagaaatcaaagtaaaatcagaggaaataacaaattatgaaattaaaagaactttataaaaataaaatatatcctaatttctattttgcaaagcagtattttggaagaataccatactatcattttgcaaagaaaagctgtgataagaagagagttgagttatcagatttaaaaaaaatagaggtaatggagatacaggaaggcgagttcgagtatgaatattttaatttctgctatttacataatatgctatcattgattatttattcattgtatcataataagtatccggaaatatgtgtaaataggggaaaagaaaatgttattcaatgggagtggtactttgaaccattgatagacagaaagaaatcggttactaaagtgaaaaaaacactttgtaataaaaaaacaaattcatttttaccaggatttaaagacatatataatcccaaagatgttcacatttggtgtcagtggtataaaaaatatatttgtttaaatgccaaaactcgagaatatgttgaaaaagaatatcaagaattgtttgcaaataagaaaagagtattgggaattatatgtcgtgggacagattatttagcattgaagcctgccggtcatccagttcagccatcaatacaagagataatcgaattttgtaagaaacatatgaaacataataaatatgatgcgatttatcttgcgactgaagaacgtcagataagagatctctttgtgaaagaatttccagggaaaattttggaaaacaaacgtaagtattacgatgatatatattataaggactcgtctatatcatatataaaagatgtgcattttgatcgggaaaatgacaattacctgtcaggtctggaatatttatcttctataatattgttatcacgatgcacatcattgattggtggaaattgtggaggaactttaggagcaatattttttaacaatgaaaaatatgagtttacacatgtatttgatttgggattatattcataagaggaaaaaatggaacaacagtataaaaggatatattatcttgatttaatgaagagcatagcaattataagtgttgtattttatcatggtgtattgccgcagataacaatgacaggaacaatgaagttctatagttattattttttacaggcttttgcagcagttgcaacacctttgttttttttcgtaaatggttttttattatttaataaagaacttgatttgcataaacatataagcaaaataatacggatgatggtttttactgttatatggggcagtataacaattattagtctcatgcttattcggaaagagattttaagtgttggagaatttctaaaaacattatggcaattcaaagaaaattggattagtcatctgtggtatatgggagagttgatatgtatttatctgtttttcccagtattctattatgcgtatcagaaaaaagcatcgatattagtatattttgtatgtattggcgctattattatttttggaaatacgtttgtgaatgaaatcatgacagtgttgtctattttagtaaaacatccggttgcgatagctaataaaaatatgtttaatatgtttaatccatttaaagatgtaaatagttatgcattaatatatttctgttgtggaggaattgtatatcgttatcaggaaaaaattaaaaattttatgaagaataaaaagtggatatttgtcaccataattatattggatacatgttttttatttatgtgcggcataatgtatacgaaattaaatcataatctttgggagatcggatggtacggaaaagaaacaatatttacgtttataaatgtattggctatttttattttatgtatgaattataataaatcaaacaaagtgattgaattaatttcaaaaaacacattaggaatttatttgatacatataccagttttaagatttattgagcaaataattgatgtcaaaataattacaacaaatatatgtatatcattcttatacacaggaatagtagtaataattacattgctagtgtctttaggtataaaaaaactcccaattgtgaatgggcttttgcgtttttagatagaagatttttaaaaatattcataagattattatgaggggaaataagaaaagcaggaaattgaaatgagaatattacaagttgtaaatgatatgcatcgtgcaggcttagaaacgatgttgatgaattattatagaaatatagatagaaatgagatacagtttgattttctgacacatagaccatataaaagcgattatgatgatgaaataatttctatgggcggaaaaatgtattatgcaccacgtttatatcctcaaaattatcttaagtattttaaatggatgaaagatttttttgaagcacatacagagtatcagattattcattcccatattgattcgatgagttatctgccattgcttgcagcgaaaaaggcaaaaataccggtaaggatagcacatagtcataatacgtctatagataaagatctaaagtatccattaaagcaactttttcgcacgaagattacaaatgttgcaaacgaatattgtgcttgtggaaaagaagcgggtagatttttattcggaaattccaattttatgattatcccaaatgcaatagaaacagaaaaatttgtttatcaaggagaaattcgcaatacaataagagagcgtttaaatctttctgataattttgtggtaggacatgttggaagattgtcatatcaaaaaaatcatgattttttaatagaaatatttgcagaattatataaaataaatccgaatgtgagactgcttttagtaggtaccggtgaaaaagaaaaagaattgcgtcttaaagtagaaaaaaaaggtctgcatgaagttgtattatttttaggaaaccgaaacgatgtaaatgaaatctatcaggctatggatgtatttgttatgccatctttttttgagggtattccggtgacagggattgaagcacagttttcaggattaacgtgtttattttctgatcaagttccgaaggaagtagacttttctggaaattgtaaatttataccattaagtgaaggtgcaaaaaaatgggcagagcaggtgatgaaggaaggcaatcttgaagaacgattacaaaaaagtcaaatggtaaatggaagcaattataatatccagaatgcgcatacgattcttgaagagtattatagaaagttaaaagagaaaatataatgaaaaagtctatgaaaactgagaatattttaattattgacagtgattatgaagaagcaagcggatttataaaaggtttagaagaagtaacttgtgaatgttggaaagttgtattacatgaaaataataaaatatatggaataaagcgatatataaaattttttacagtggcattaggtactgttttttcatcatctcattatgaaggaaagatggtattgtgctggcaacagttttatggtatagcgattgccttttttagtagactgtttcatgtaaaaaaaagatataagctgattattatgacgtttatttataaacccaaaaaaggaataataggaaaattattttataaatttgtaaaatatgcaattacatccaaatatgtggataaaattatattgactacgcaaagtgagaaaaatatgtacaaagatatatttggtgtagaagatcaaatatttggctttgcgaaatgcggagcaatagaatatattccggaaaagttcgatgatttttctttgaagaaaaggaattatttattttcaaccggaagaagtaatagggattacaattttttgataaatgctgttgaaaatacagaatatcctttgataattgcgtgtgatgttttagatgctgaatcaaaaggtaatattgaagtgaaaaaagatatatttggaaatgatatgttgcgttatatgagaaatgccagaggagttgtgattgctcttgatgatgataaaattgcttctgggcaacttgtttttttacatgcaatgaatatgggggtaccggttattattacaaaatctcatggaataacagacgattatgtaaaaaataactataatgggttaattattgaaaaaacagaaagtgatttattagaggcattagataaaatttataaagatgatgaactatactacaacttgtgtgaaaacgaaaaaagagaattttatgacaattatacatattatgcaatggggaaaaatatcggaaaaattttaaattctatcaaaacggatagtatttaatactatcttattatatgaagaggtatagatatgaaagaggaattaataagtattattgtgccaatatataatgtagctaaatatttggatagatgtatgaagtcattgttagatcaatcatatcaaaatattgagattattttgatagatgatggatcaacagatgatagtggtgaaaaatgtgaattttattcttcaaaagataatagaataaaagttattcataaaaaaaatgaaggacttggtatggcaaggaattctggattaaaaattgcacaaggaaaatatgtattgtttgttgattcagatgattatattgaatcccaaatgattgaaagattatatgacaaattaaagaaaaataatgcagatacttgtttttgccgatattataatacttctgtagatggaagagatactatagccagagaattatataagaaaaataactatttaggggaagaagtaaaagaagtattattgggaatgataggatcacagcagagtcaacctggagatgttgaaatcggaatgtcggtttggaaaggattatattctttggatattattagaaataatcacataatttttccttctgaaagagaatatatatctgaagatatcatttttcatatacactatatacctttaacaaagcatattgctattgaaaatacagctaactatcattattgtgataatggttcttcattgactaaaaaatacaatccgaatcgttttataatggaaaaacggttaatgaaaaaagaaattagcgagttagagaaaatttttgaaaaagatgaatttattcaaagattgtataaagcctttttaggaagagtgcgctattgtataaagcaagaagtattgttaaattcaaaaaaaatcaaaattagaaaaaatattaaagctatttgcagtgatgaaactgttcaagatattatattgaattttgatgacaaaaaaattcaaattactaaacgtatagtgaattttttcataaagaagaaattagtttttgcacttatgatagtattccgtataaaaaagtaggaacaaggaaacatttagtgaagaaaatatttgtattattaaacttaccacggacgggaataatatatttctttattttgcattgcaaaaataaaagagacatattggaagatttgcatatgataataaaaaacacgcaaatagatacttgacattttcagaggtgattttatttgataaatgtttcaggaacgttttagattttcgattaaagaagaattgtattttatattcaataattttaagatttctttttccgctaaaaaaagatatggaaatcggaagatgtgaaataaaaggtgggttagtttgtta
